(19) United States
(12) Patent Application Publication
(10) Pub. No.: US 2015/0023949 A1
(43) Pub. Date: Jan. 22, 2015

(54) COMPOSITIONS AND METHODS FOR DIAGNOSIS AND TREATMENT OF PERVASIVE DEVELOPMENTAL DISORDER

(71) Applicant: Berg LLC, Nashville, TN (US)

(72) Inventors: Niven Rajin Narain, Cambridge, MA (US); Paula Patricia Narain, Cambridge, MA (US)

(21) Appl. No.: 14/383,450

(22) PCT Filed: Mar. 5, 2013
(86) PCT No.: PCT/US13/29201

§ 371 Date: Sep. 5, 2014

Related U.S. Application Data
(60) Provisional application No. 61/606,935, filed on Mar. 5, 2012.

(51) Int. Cl. G01N 33/68; A61K 38/17; A61K 38/45; A61K 38/48; A61K 38/44; C07K 16/18; C12Q 1/68; A61K 38/46

(52) U.S. Cl. CPC G01N 33/6896; C12Q 1/6883; A61K 38/1709; A61K 38/46; A61K 38/4813; A61K 38/44; C07K 16/18; A61K 38/45; G01N 2800/52; G01N 2800/50; G01N 2800/56; G01N 2500/00; G01N 2333/47; G01N 2333/70546; G01N 2333/914; G01N 2333/8121; G01N 2333/9643; G01N 2333/902; G01N 2333/948; G01N 2333/705; C07K 2317/51; C12Q 2600/158; C12Q 2600/136
USPC 424/130.1; 435/6.12; 514/17.5; 506/10; 435/6.11; 436/501; 435/7.92; 506/8; 506/9; 435/7.21; 424/94.6; 424/94.63; 424/94.4; 514/13.5; 424/94.5

(57) ABSTRACT

Methods for treatment and diagnosis of pervasive developmental disorders in humans are described.

### CROSS-REFERENCE TO RELATED APPLICATIONS

[0001] This application claims priority to U.S. Provisional Application Ser. No. 61/606,935, filed Mar. 5, 2012, entitled “Compositions and Methods for Diagnosis and Treatment of Pervasive Developmental Disorder”, the entire content of which is hereby incorporated herein by reference.

### SEQUENCE LISTING

[0002] The instant application contains a Sequence Listing which has been submitted in ASCII format via EFS-Web and is hereby incorporated by reference in its entirety. Said ASCII copy, created on Feb. 28, 2013, is named 119992-05920_SL.txt and is 1,144,066 bytes in size.

### BACKGROUND OF THE INVENTION

[0003] Pervasive developmental disorders are an important public health concern. This is especially true for autism spectrum disorders such as autism and Asperger's syndrome, which are prevalent, debilitating conditions that begin in early childhood and for which effective treatments are needed. The disorders have a complex etiology that is not well understood.

[0004] Autism spectrum disorders are highly heritable, but environmental causes also play an important role. The concordance rate is about 90% for monozygotic twins and about 10% in dizygotic twins. Specific genes associated with autism spectrum disorders have been identified; however, autism spectrum disorder is associated with known genetic predispositons in only about 10-15% of cases (Levy, S. E., et al. Lancet 374(9701): 1627-1638 (2010), hereinafter Levy et al.). Moreover, none of these genetic predispositions are specific to the development of pervasive developmental disorders.

[0005] Various neurobiological abnormalities have been observed in autism spectrum disorders. These disorders are characterized by macrocephaly; overgrowth in cortical white matter and abnormal patterns of growth in the frontal lobe, temporal lobes, and limbic structures such as the amygdale; and cytoarchitectural abnormalities in cortical minicolumns and in the cerebellum. Recent findings indicate that the brains of autistic individuals exhibit dysregulation of proteins that are involved in apoptosis and in the normal lamination and maintenance of synaptic plasticity of the brain.

[0006] There exists a need in the art for methods of treatment, prevention, reduction, diagnosis and prognosis of pervasive developmental disorders.

### SUMMARY OF THE INVENTION

[0007] The present invention is based, at least in part, on the discovery that the proteins listed in Tables 2-6 are modulated, e.g., upregulated or downregulated, in cells derived from a subject afflicted with Autism or Alzheimer's disease, as compared to normal, control cells, e.g., cells derived from a subject that is not afflicted with Autism or Alzheimer's disease (e.g., cells derived from an unaffected sibling or parent of the afflicted subject). Accordingly, the prevent invention provides methods for treating, alleviating symptoms of, inhibiting progression of, preventing, diagnosing, or prognosing a pervasive developmental disorder in a subject involving one or more of the proteins listed in Tables 2-6.

[0008] Specifically, in one aspect the invention provides methods of assessing whether a subject is afflicted with a pervasive developmental disorder, the method comprising: (1) determining a level of expression of one or more of the markers listed in Tables 2-6 in a biological sample obtained from the subject, using reagents that transform the markers such that the markers can be detected; (2) comparing the level of expression of the one or more markers in the biological sample obtained from the subject with the level of expression of the one or more markers in a control sample; and (3) assessing whether the subject is afflicted with a pervasive developmental disorder, wherein a modulation in the level of expression of the one or more markers in the biological sample obtained from the subject relative to the level of expression of the one or more markers in the control sample is an indication that the subject is afflicted with a pervasive developmental disorder.

[0009] In another aspect, the invention provides methods of prognosing whether a subject is predisposed to developing a pervasive developmental disorder, the method comprising: (1) determining a level of expression of one or more of the markers listed in Tables 2-6 present in a biological sample obtained from the subject, using reagents that transform the markers such that the markers can be detected; (2) comparing the level of expression of the one or more markers present in the biological sample obtained from the subject with the level of expression of the one or more markers present in a control sample; and (3) prognosing whether the subject is predisposed to developing a pervasive developmental disorder, wherein a modulation in the level of expression of the one or more proteins in the biological sample obtained from the subject relative to the level of expression of the one or more proteins in the control sample is an indication that the subject is predisposed to developing a pervasive developmental disorder.

[0010] In another aspect, the invention provides methods of prognosing the severity of a pervasive developmental disorder in a subject, the method comprising (1) determining a level of expression of one or more of the markers listed in Tables 2-6 in a biological sample obtained from the subject, using reagents that transform the markers such that the markers can be detected; (2) comparing the level of expression of the one or more markers in the biological sample obtained from the subject with the level of expression of the one or more markers in a control sample; and (3) assessing the severity of the pervasive developmental disorder, wherein a modulation in the level of expression of the one or more markers in the biological sample obtained from the subject relative to the level of expression of the one or more markers in the control sample is an indication of the severity of the pervasive developmental disorder in the subject.

[0011] In some embodiments, modulation of the level of expression of the one or more markers in the sample from the subject away from the levels of expression of a control sample by, e.g., at least 2-fold, 3-fold, 4-fold, 5-fold, 10-fold, 15-fold, 10-fold, 30-fold, 40-fold, 50-fold, 100-fold or greater, is an indication that the pervasive developmental disorder in the subject is severe. In some embodiments, modulation of the level of expression of the one or more markers in the sample from the subject further away from levels of expression in a control sample than that of the levels of expression in a sample from a subject suffering from a non-severe form of a pervasive developmental disorder is an indication that the pervasive developmental disorder in the subject is severe.

[0012] In some embodiments, modulation of the level of expression of the one or more markers in the sample from the subject towards the levels of expression of a control sample by, e.g., at least 2-fold, 3-fold, 4-fold, 5-fold, 10-fold, 15-fold, 10-fold, 30-fold, 40-fold, 50-fold, 100-fold or greater, is an indication that the pervasive developmental disorder in the subject is not severe. In some embodiments, modulation of the level of expression of the one or more markers in the sample from the subject closer to the levels of expression in a control sample than that of the levels of expression in a sample from a subject suffering from a severe form of a pervasive developmental disorder is an indication that the pervasive developmental disorder in the subject is not severe.

[0013] In another aspect, the invention provides methods for monitoring the progression of a pervasive developmental disorder or symptoms of a pervasive developmental disorder in a subject, the method comprising: (1) determining a level of expression of one or more of the markers listed in Tables 2-6 present in a first biological sample obtained from the subject at a first time, using reagents that transform the markers such that the markers can be detected; (2) determining a level of expression of the one or more of the markers listed in Tables 2-6 present in a second biological sample obtained from the subject at a second, later time, using reagents that transform the markers such that the markers can be detected; and (3) comparing the level of expression of the one or more markers listed in Tables 2-6 present in a first sample obtained from the subject at the first time with the level of expression of the one or more markers present in a second sample obtained from the subject at the second, later time; and (4) monitoring the progression of the pervasive developmental disorder, wherein a modulation in the level of expression of the one or more markers in the second sample as compared to the first sample is an indication of the progression of the pervasive developmental disorder or symptoms of the pervasive developmental disorder in the subject.

[0014] In one embodiment, modulation of the level of expression in the second sample away from the levels of expression in a control sample, e.g., further away from normal or control levels of expression than that of the levels of expression in the first sample at the first time, is an indication of the progression of the pervasive developmental disorder or symptoms of the pervasive developmental disorder in the subject.

[0015] In one embodiment, a lack of modulation in the level of expression in the second sample as compared to the first sample (e.g., the levels of expression in the first and second sample are approximately the same) is an indication that the pervasive developmental disorder or symptoms of the pervasive developmental disorder have not progressed in the subject. In one embodiment, modulation of the level of expression in the second sample towards the levels of expression in a control sample, e.g., closer to normal or control levels of expression than that of the levels of expression in the first sample at the first time, is an indication that the pervasive developmental disorder or symptoms of the pervasive developmental disorder have not progressed in the subject.

[0016] In one embodiment, the methods further comprise selecting a treatment regimen for the subject identified as being afflicted with a pervasive developmental disorder or predisposed to developing a pervasive developmental disorder.

[0017] In one embodiment, the method further comprise administering a treatment regimen to the subject identified as being afflicted with a pervasive developmental disorder or predisposed to developing a pervasive developmental disorder.

[0018] In one embodiment, the method further comprise continuing administration of an ongoing treatment regimen to the subject for whom the progression of the pervasive developmental disorder is determined to be reduced, delayed or lessened.

[0019] In another aspect, the invention provides a method for assessing the efficacy of a treatment regimen for treating a pervasive developmental disorder or symptoms of a pervasive developmental disorder in a subject, the method comprising:

[0020] (1) determining a level of expression of one or more of the markers listed in Tables 2-6 present in a first biological sample obtained from the subject prior to administering at least a portion of the treatment regimen to the subject, using reagents that transform the markers such that the markers can be detected;

[0021] (2) determining a level of expression of one or more of the markers listed in Tables 2-6 present in a second biological sample obtained from the subject following administration of at least a portion of the treatment regimen to the subject, using reagents that transform the markers such that the markers can be detected;

[0022] (3) comparing the level of expression of one or more markers listed in Tables 2-6 present in a first sample obtained from the subject prior to administering at least a portion of the treatment regimen to the subject with the level of expression of the one or more markers present in a second sample obtained from the subject following administration of at least a portion of the treatment regimen; and

[0023] (4) assessing whether the treatment regimen is efficacious for treating the pervasive developmental disorder or symptoms of the pervasive developmental disorder, wherein a modulation in the level of expression of the one or more markers in the second sample as compared to the first sample is an indication that the treatment regimen is efficacious for treating the pervasive developmental disorder or symptoms of the pervasive developmental disorder in the subject.

[0024] In one embodiment, the method further comprises continuing administration of the treatment regimen to the subject for whom the treatment regimen is determined to be efficacious for treating the pervasive developmental disorder or symptoms of the pervasive developmental disorder, or discontinuing administration of the treatment regimen to the subject for whom the treatment regimen is determined to be non-efficacious for treating the pervasive developmental disorder or symptoms of the pervasive developmental disorder.

[0025] In another aspect, the invention provides a method of identifying a compound for treating a pervasive developmental disorder or symptoms of pervasive developmental disorders in a subject, the method comprising:

[0026] (1) contacting a biological sample with a test compound;

[0027] (2) determining the level of expression of one or more markers listed in Tables 2-6 present in the biological sample;

[0028] (3) comparing the level of expression of the one or more markers in the biological sample with that of a control sample not contacted by the test compound; and

[0029] (4) selecting a test compound that modulates the level of expression of the one or more markers in the biological sample,

[0030] thereby identifying a compound for treating a pervasive developmental disorder or symptoms of a pervasive developmental disorder in a subject.

[0031] In one embodiment, the pervasive developmental disorder is an autism spectrum disorder.

[0032] In one embodiment, the pervasive developmental disorder is autistic disorder.

[0033] In one embodiment, the pervasive developmental disorder is Alzheimer's disease.

[0034] In one embodiment, the pervasive developmental disorder is autism and Alzheimer's disease. In one embodiment, the pervasive developmental disorder is autism and alzheimer's disease, and the markers are one or more of the markers listed in Table 3.

[0035] In one embodiment, the pervasive developmental disorder is Asperger's syndrome.

[0036] In one embodiment, the pervasive developmental disorder is pervasive developmental disorder-not otherwise specified.

[0037] In one embodiment, the subject suffers from a pervasive developmental disorder.

[0038] In one embodiment, the subject exhibits subsyndromal manifestations of a pervasive developmental disorder.

[0039] In one embodiment, the subject is suspected to suffer from or be predisposed to developing a pervasive developmental disorder.

[0040] In one embodiment, the sample obtained from the subject is processed such that the sample is transformed, thereby allowing the determination of a level of expression of one or more of the markers listed in Tables 2-6.

[0041] In one embodiment, the level of expression of the one or more markers is determined at a nucleic acid level.

[0042] In one embodiment, the level of expression of the one or more markers is determined by detecting RNA. In one embodiment, the level of expression of the one or more markers is determined by detecting mRNA, miRNA, or hnRNA. In one embodiment, the level of expression of the one or more markers is determined by detecting DNA. In one embodiment, the level of expression of the one or more markers is determined by detecting cDNA.

[0043] In one embodiment, the level of expression of the one or more markers is determined by using a technique selected from the group consisting of a polymerase chain reaction (PCR) amplification reaction, reverse-transcriptase PCR analysis, quantitative reverse-transcriptase PCR analysis, Northern blot analysis, an RNAase protection assay, digital RNA detection/quantitation, and a combination or sub-combination thereof.

[0044] In one embodiment, determining the level of expression of the one or more markers comprises performing an immunoassay using an antibody.

[0045] In one embodiment, the one or more markers comprises a protein.

[0046] In one embodiment, the protein is detected using a binding protein that binds at least one of the one or more markers.

[0047] In one embodiment, the binding protein comprises an antibody, or antigen binding fragment thereof, that specifically binds to the protein.

[0048] In one embodiment, the antibody or antigen binding fragment thereof is selected from the group consisting of a murine antibody, a human antibody, a humanized antibody, a bispecific antibody, a chimeric antibody, a Fab, Fab′, F(ab′)₂, scFv, SMIP, affibody, avimer, versabody, nanobody, a domain antibody, and an antigen binding fragment of any of the foregoing.

[0049] In one embodiment, the binding protein comprises a multispecific binding protein. In one embodiment, the multispecific binding protein comprises a dual variable domain immunoglobulin (DVD-Ig™) molecule, a halfhalf-body DVD-Ig (hDVD-Ig) molecule, a triple variable domain immunoglobulin (TVD-IgtDVD-Ig) molecule, and a receptor variable domain immunoglobulin (rDVD-Ig) molecule. In one example, the multispecific binding protein (e.g., a polyvalent DVD-Ig (pDVD-Ig) molecule), a monobody DVD-Ig (mDVD-Ig) molecule, a cross over (coDVD-Ig) molecule, a blood brain barrier (bbbDVD-Ig) molecule, a cleavable linker DVD-Ig (clDVD-Ig) molecule, or a redirected cytotoxicity DVD-Ig (rcDVD-Ig) molecule.

[0050] In one embodiment, the antibody or antigen binding fragment thereof comprises a label.

[0051] In one embodiment, the label is selected from the group consisting of a radio-label, a biotin-label, a chromophore, a fluorophore, and an enzyme.

[0052] In one embodiment, the level of expression of at least one of the one or more markers is determined by using a technique selected from the group consisting of an immunoassay, a western blot analysis, a radioimmunoassay, immunofluorimetry, immunoprecipitation, equilibrium dialysis, immunodiffusion, an electrochemiluminescence immunoassay (ECLIA), an ELISA assay, a polymerase chain reaction, an immunopolymerase chain reaction, and combinations or sub-combinations thereof.

[0053] In one embodiment, the immunoassay comprises a solution-based immunoassay selected from the group consisting of electrochemiluminescence, chemiluminescence, fluorogenic chemiluminescence, fluorescence polarization, and time-resolved fluorescence.

[0054] In one embodiment, the immunoassay comprises a sandwich immunoassay selected from the group consisting of electrochemiluminescence, chemiluminescence, and fluorogenic chemiluminescence.

[0055] In one embodiment, the sample comprises a fluid, or component thereof, obtained from the subject. In one embodiment, the fluid is selected from the group consisting of blood, serum, synovial fluid, lymph, plasma, urine, amniotic fluid, aqueous humor, vitreous humor, bile, breast milk, cerebrospinal fluid, cerumen, chyle, cystic fluid, endolymph, feces, gastric acid, gastric juice, mucus, nipple aspirates, pericardial fluid, perilymph, peritoneal fluid, pleural fluid, pus, saliva, sebum, semen, sweat, serum, sputum, tears, vaginal secretions, and fluid collected from a biopsy.

[0056] In one embodiment, the sample comprises a tissue or cell, or component thereof, obtained from the subject.

[0057] In another aspect, the invention provides a method for treating, alleviating symptoms of, inhibiting progression of, or preventing a pervasive developmental disorder in a subject, the method comprising administering to the subject in need thereof a therapeutically effective amount of a pharmaceutical composition comprising one or more of the markers listed in Tables 2-6.

[0058] In another aspect, the invention provides a method for treating, alleviating symptoms of, inhibiting progression of, or preventing a pervasive developmental disorder in a subject, the method comprising administering to the subject in need thereof a therapeutically effective amount of a pharmaceutical composition comprising an agent that modulates expression or activity of one or more of the markers listed in Tables 2-6.

[0059] In one embodiment, the agent inhibits expression or activity of one or more of the markers listed in Tables 2-6.

[0060] In one embodiment, the agent augments expression or activity of one or more of the markers listed in Tables 2-6.

[0061] In another aspect, the invention provides a method of identifying an agent that modulates the expression or activity of one or more of the markers listed in Tables 2-6, comprising contacting the one or more markers with a test agent, detecting the expression or activity of the one or more markers contacted with the test agent, comparing the expression or activity of the one or more markers contacted with the test agent with the activity of a control, e.g., expression or activity of the one or more markers not contacted with the test agent, and identifying an agent that modulates the expression or activity of the one or more markers.

[0062] In one embodiment, the agent down-modulates at least one of the one or more markers listed in Tables 2-6.

[0063] In one embodiment, the agent up-modulates at least one of the one or more markers listed in Tables 2-6.

[0064] In another aspect, the invention provides a method for treating, alleviating symptoms of, inhibiting progression of, or preventing a pervasive developmental disorder in a subject, the method comprising administering to the subject in need thereof a therapeutically effective amount of a pharmaceutical composition comprising an agent identified according to the foregoing methods.

[0065] In one embodiment of all of the foregeoing aspects, the subject is a human subject.

[0066] The invention described herein is based, at least in part, on a novel, collaborative utilization of network biology, genomic, proteomic, metabolomic, transcriptomic, and bioinformatics tools and methodologies, which, when combined, may be used to study selected disease conditions including pervasive developmental disorder, such as autism and Alzheimer's disease, using a systems biology approach. In a first step of the Platform Technology, cellular modeling systems are developed to probe the disease process, e.g., pervasive development disorder, including autism, comprising disease-related cells, optionally subjected to various disease-relevant environment stimuli (e.g., hyperglycemia, hypoxia, immuno-stress, and lipid peroxidation). In some embodiments, the cellular modeling system involves cellular cross-talk mechanisms between various interacting cell types. In a second step, high throughput biological readouts from the cell model system are obtained by using a combination of techniques, including, for example, mass spectrometry (LC/MSMS), flow cytometry, cell-based assays, and functional assays. In a third step, the high throughput biological readouts are then subjected to a bioinformatic analysis to study congruent data trends by in vitro, in vivo, and in silico modeling. The resulting matrices allow for cross-related data mining where linear and non-linear regression analysis are carried out to identify conclusive pressure points (or “hubs”). These “hubs”, as presented herein, are candidates for drug discovery. In particular, these hubs represent potential drug targets and/or biological markers for pervasive developmental disorders.

[0067] The molecular signatures of the differentials between the disease (e.g., pervasive developmental disorder) and normal phenotype allow for insight into the mechanisms that lead to disease onset and progression. Taken together, the combination of the Platform Technology described above with strategic cellular modeling allows for robust intelligence that can be employed to further our understanding of the disease while simultaneously creating biomarker libraries and drug candidates that may clinically augment standard of care.

[0068] A significant feature of the platform of the invention is that the AI-based system is based on the data sets obtained from the cell model system, without resorting to or taking into consideration any existing knowledge in the art, such as known biological relationships (i.e., no data points are artificial), concerning the biological process. Accordingly, the resulting statistical models generated from the platform are unbiased. Another significant feature of the platform of the invention and its components, e.g., the cell model systems and data sets obtained therefrom, is that it allows for continual building on the cell models over time (e.g., by the introduction of new cells and/or conditions), such that an initial, “first generation” consensus causal relationship network generated from a cell model for a pervasive developmental disorder, e.g., autism, can evolve along with the evolution of the cell model itself to a multiple generation causal relationship network (and delta or delta-delta networks obtained therefrom). In this way, both the cell models, the data sets from the cell models, and the causal relationship networks generated from the cell models by using the Platform Technology methods can constantly evolve and build upon previous knowledge obtained from the Platform Technology.

[0069] Accordingly, in one aspect, the invention provides a method for identifying a modulator of a disease process, e.g., pervasive developmental disorder, said method comprising: (1) establishing a disease model for the disease process, e.g., pervasive developmental disorder, using disease related cells, e.g. cells related to a pervasive developmental disorder, to represent a characteristic aspect of the disease process, e.g., pervasive developmental disorder; (2) obtaining a first data set from the disease model, wherein the first data set represents expression levels of a plurality of genes in the disease related cells; (3) optionally, obtaining a second data set from the disease model, wherein the second data set represents a functional activity or a cellular response of the disease related cells; (4) generating a consensus causal relationship network among the expression levels of the plurality of genes and/or the functional activity or cellular response based solely on the first data set and optionally the second data set using a programmed computing device, wherein the generation of the consensus causal relationship network is not based on any known biological relationships other than the first data set and the second data set; (5) identifying, from the consensus causal relationship network, a causal relationship unique in the disease process (e.g., pervasive developmental disorder), wherein a gene associated with the unique causal relationship is identified as a modulator of the disease process (e.g., pervasive developmental disorder).

[0070] In certain embodiments, the disease process is pervasive developmental disorder.

[0071] In certain embodiments, the disease process is autism or autism spectrum disorder.

[0072] In certain embodiments, the modulator stimulates or promotes the disease process.

[0073] In certain embodiments, the modulator inhibits the disease process.

[0074] In certain embodiments, the modulator shifts the energy metabolic pathway specifically in disease cells from a glycolytic pathway towards an oxidative phosphorylation pathway.

[0075] In certain embodiments, the disease model comprises an in vitro culture of disease cells, optionally further comprising a matching in vitro culture of control or normal cells.

[0076] In certain embodiments, the in vitro culture of the disease cells is subject to an environmental perturbation, and the in vitro culture of the matching control cells is identical disease cells not subject to the environmental perturbation.

[0077] In certain embodiments, the environmental perturbation comprises one or more of a contact with an agent, a change in culture condition, an introduced genetic modification/mutation, and a vehicle (e.g., vector) that causes a genetic modification/mutation.

[0078] In certain embodiments, the first data set comprises protein and/or mRNA expression levels of the plurality of genes.

[0079] In certain embodiments, the first data set further comprises one or more of lipidomics data, metabolomics data, transcriptomics data, and single nucleotide polymorphism (SNP) data.

[0080] In certain embodiments, the second data set comprises one or more of bioenergetics profiling, cell proliferation, apoptosis, organellar function, and a genotype-phenotype association actualized by functional models selected from ATP, ROS, OXPHOS, and Seahorse assays.

[0081] In certain embodiments, step (4) is carried out by an artificial intelligence (AI)-based informatics platform.

[0082] In certain embodiments, the AI-based informatics platform comprises REFS™.

[0083] In certain embodiments, the AI-based informatics platform receives all data input from the first data set and the second data set without applying a statistical cut-off point.

[0084] In certain embodiments, the consensus causal relationship network established in step (4) is further refined to a simulation causal relationship network, before step (5), by in silico simulation based on input data, to provide a confidence level of prediction for one or more causal relationships within the consensus causal relationship network.

[0085] In certain embodiments, the unique causal relationship is identified as part of a differential causal relationship network that is uniquely present in disease cells, and absent in the matching control cells.

[0086] In certain embodiments, the method further comprises validating the identified unique causal relationship in a biological system.

[0087] In another aspect, the invention relates to a method for providing a disease model for pervasive developmental disorder for use in a platform method, comprising: establishing a disease model for a pervasive developmental disorder, using disease related cells, e.g., cells related to a pervasive developmental disorder, to represent a characteristic aspect of the pervasive developmental disorder, wherein the disease model for pervasive developmental disorder is useful for generating disease model data sets used in the platform method; thereby providing a disease model for pervasive developmental disorder for use in a platform method.

[0088] In another aspect, the invention relates to a method for obtaining a first data set and second data set from a disease model for pervasive developmental disorder for use in a platform method, comprising: (1) obtaining a first data set from a disease model for pervasive developmental disorder for use in a platform method, wherein the disease model comprises disease related cells, e.g., cells related to a pervasive developmental disorder, and wherein the first data set represents expression levels of a plurality of genes in the disease related cells; (2) optionally obtaining a second data set from the disease model for use in a platform method, wherein the second data set represents a functional activity or a cellular response of the disease related cells; thereby obtaining a first data set and second data set from the disease model for pervasive developmental disorder; thereby obtaining a first data set and second data set from a disease model for pervasive developmental disorder for use in a platform method.

[0089] In another aspect, the invention relates to a method for identifying a modulator of a pervasive developmental disorder, said method comprising: (1) generating a consensus causal relationship network among a first data set and optionally a second data set obtained from a disease model for a pervasive developmental disorder, wherein the disease model for a pervasive developmental disorder comprises disease cells, e.g. cells related to a pervasive developmental disorder, and wherein the first data set represents expression levels of a plurality of genes in the disease related cells and the second data set represents a functional activity or a cellular response of the disease related cells, using a programmed computing device, wherein the generation of the consensus causal relationship network is not based on any known biological relationships other than the first data set and the second data set; (2) identifying, from the consensus causal relationship network, a causal relationship unique in the pervasive developmental disorder, wherein a gene associated with the unique causal relationship is identified as a modulator of a pervasive developmental disorder; thereby identifying a modulator of a pervasive developmental disorder.

[0090] In another aspect, the invention relates to a method for identifying a modulator of a pervasive developmental disorder, said method comprising: 1) providing a consensus causal relationship network generated from a disease model for the pervasive developmental disorder; 2) identifying, from the consensus causal relationship network, a causal relationship unique in the pervasive developmental disorder, wherein a gene associated with the unique causal relationship is identified as a modulator of a pervasive developmental disorder; thereby identifying a modulator of a pervasive developmental disorder.

[0091] In certain embodiments, the consensus causal relationship network is generated among a first data set and second data set obtained from the disease model for the pervasive developmental disorder, wherein the disease model comprises disease cells, e.g., cells related to a pervasive developmental disorder, and wherein the first data set represents expression levels of a plurality of genes in the disease related cells and the second data set represents a functional activity or a cellular response of the disease related cells, using a programmed computing device, wherein the generation of the consensus causal relationship network is not based on any known biological relationships other than the first data set and the second data set.

[0092] In certain embodiments, the disease process is pervasive developmental disorder.

[0093] In certain embodiments, the disease process is autism or autism spectrum disorder.

[0094] In certain embodiments, the modulator stimulates or promotes the disease process.

[0095] In certain embodiments, the modulator inhibits the disease process.

[0096] In certain embodiments, the modulator shifts the energy metabolic pathway specifically in disease cells from a glycolytic pathway towards an oxidative phosphorylation pathway.

[0097] In certain embodiments, the disease model comprises an in vitro culture of disease cells, optionally further comprising a matching in vitro culture of control or normal cells.

[0098] In certain embodiments, the in vitro culture of the disease cells is subject to an environmental perturbation, and the in vitro culture of the matching control cells is identical disease cells not subject to the environmental perturbation.

[0099] In certain embodiments, the environmental perturbation comprises one or more of a contact with an agent, a change in culture condition, an introduced genetic modification/mutation, and a vehicle (e.g., vector) that causes a genetic modification/mutation.

[0100] In certain embodiments, the first data set comprises protein and/or mRNA expression levels of the plurality of genes.

[0101] In certain embodiments, the first data set further comprises one or more of lipidomics data, metabolomics data, transcriptomics data, and single nucleotide polymorphism (SNP) data.

[0102] In certain embodiments, the second data set comprises one or more of bioenergetics profiling, cell proliferation, apoptosis, organellar function, and a genotype-phenotype association actualized by functional models selected from ATP, ROS, OXPHOS, and Seahorse assays.

[0103] In certain embodiments, step (4) is carried out by an artificial intelligence (AI)-based informatics platform.

[0104] In certain embodiments, the AI-based informatics platform comprises REFS™.

[0105] In certain embodiments, the AI-based informatics platform receives all data input from the first data set and the second data set without applying a statistical cut-off point.

[0106] In certain embodiments, the consensus causal relationship network established in step (4) is further refined to a simulation causal relationship network, before step (5), by in silico simulation based on input data, to provide a confidence level of prediction for one or more causal relationships within the consensus causal relationship network.

[0107] In certain embodiments, the unique causal relationship is identified as part of a differential causal relationship network that is uniquely present in disease cells, and absent in the matching control cells.

[0108] In certain embodiments, the method further comprising validating the identified unique causal relationship in a biological system.

[0109] In certain embodiments, the “environmental perturbation”, also referred to herein as “external stimulus component”, is a therapeutic agent. In certain embodiments, the external stimulus component is a small molecule (e.g., a small molecule of no more than 5 kDa, 4 kDa, 3 kDa, 2 kDa, 1 kDa, 500 Dalton, or 250 Dalton). In certain embodiments, the external stimulus component is a biologic. In certain embodiments, the external stimulus component is a chemical. In certain embodiments, the external stimulus component is endogenous or exogenous to cells. In certain embodiments, the external stimulus component is a MIM or epishifter. In certain embodiments, the external stimulus component is a stress factor for the cell system, such as hypoxia, hyperglycemia, hyperlipidemia, hyperinsulinemia, and/or lactic acid rich conditions.

[0110] In certain embodiments, the external stimulus component may include a therapeutic agent or a candidate therapeutic agent for treating a disease condition, including chemotherapeutic agent, protein-based biological drugs, antibodies, fusion proteins, small molecule drugs, lipids, polysaccharides, nucleic acids, etc.

[0111] In certain embodiments, the external stimulus component may be one or more stress factors, such as those typically encountered in vivo under the various disease conditions, including hypoxia, hyperglycemic conditions, acidic environment (that may be mimicked by lactic acid treatment), etc.

[0112] In other embodiments, the external stimulus component may include one or more MIMs and/or epishifters, as defined herein below. MIMs and epishifters are further described in U.S. application Ser. Nos. 12/777,902, 12/778029, 12/778054, and 12/778010, the entire contents of which are hereby expressly incorporated herein by reference. Exemplary MIMs include Coenzyme Q10 (also referred to herein as CoQ10), compounds in the Vitamin B family, or nucleosides, mononucleotides or dinucleotides that comprise a compound in the Vitamin B family, vitamin D2, vitamin D3, 1,25-(OH)₂-vitamin D2 and 1,25-(OH)₂-vitamin D3.

[0113] In making cellular output measurements (such as protein expression), either absolute amount (e.g., expression amount) or relative level (e.g., relative expression level) may be used. In one embodiment, absolute amounts (e.g., expression amounts) are used. In one embodiment, relative levels or amounts (e.g., relative expression levels) are used. For example, to determine the relative protein expression level of a cell system, the amount of any given protein in the cell system, with or without the external stimulus to the cell system, may be compared to a suitable control cell line or mixture of cell lines (such as all cells used in the same experiment) and given a fold-increase or fold-decrease value. The skilled person will appreciate that absolute amounts or relative amounts can be employed in any cellular output measurement, such as gene and/or RNA transcription level, level of lipid, or any functional output, e.g., level of apoptosis, level of toxicity, or ECAR or OCR as described herein. A pre-determined threshold level for a fold-increase (e.g., at least 1.2, 1.3, 1.4, 1.5, 1.6, 1.7, 1.8, 1.9, 2, 2.5, 3, 3.5, 4, 4.5, 5, 6, 7, 8, 9, 10, 15, 20, 25, 30, 35, 40, 45, 50, 75 or 100 or more fold increase) or fold-decrease (e.g., at least a decrease to 0.9, 0.8, 0.75, 0.7, 0.6, 0.5, 0.45, 0.4, 0.35, 0.3, 0.25, 0.2, 0.15, 0.1 or 0.05 fold, or a decrease to 90%, 85%, 80%, 75%, 70%, 65%, 60%, 55%, 50%, 45%, 40%, 35%, 30%, 25%, 20%, 15%, 10% or 5% or less) may be used to select significant differentials, and the cellular output data for the significant differentials may then be included in the data sets (e.g., first and second data sets) utilized in the platform technology methods of the invention. The skilled person will recognize that all values presented in the foregoing list can also be the upper or lower limit of ranges, e.g., between 1.5 and 5 fold, 5 and 10 fold, 2 and 5 fold, or between 0.9 and 0.7, 0.9 and 0.5, or 0.7 and 0.3 fold, which are intended to be a part of this invention.

[0114] Throughout the present application, all values presented in a list, e.g., such as those above, can also be the upper or lower limit of ranges that are intended to be a part of this invention.

[0115] In one embodiment of the methods of the invention, not every observed causal relationship in a causal relationship network may be of biological significance. With respect to any given biological system for which the subject interrogative biological assessment is applied, some (or maybe all) of the causal relationships (and the genes associated therewith) may be “determinative” with respect to the specific biological problem at issue, e.g., either responsible for causing a disease condition (a potential target for therapeutic intervention) or is a biomarker for the disease condition (a potential diagnostic or prognostic factor). In one embodiment, an observed causal relationship unique in the biological system is determinative with respect to the specific biological problem at issue. In one embodiment, not every observed causal relationship unique in the biological system is determinative with respect to the specific problem at issue.

[0116] Such determinative causal relationships may be selected by an end user of the subject method, or it may be selected by a bioinformatics software program, such as REFS, DAVID-enabled comparative pathway analysis program, or the KEGG pathway analysis program. In certain embodiments, more than one bioinformatics software program is used, and consensus results from two or more bioinformatics software programs are preferred.

[0117] As used herein, “differentials” of cellular outputs include differences (e.g., increased or decreased levels) in any one or more parameters of the cellular outputs. In certain embodiments, the differentials are each independently selected from the group consisting of differentials in mRNA transcription, protein expression, protein activity, metabolite/intermediate level, and/or ligand-target interaction. For example, in terms of protein expression level, differentials between two cellular outputs, such as the outputs associated with a cell system before and after the treatment by an external stimulus component, can be measured and quantitated by using art-recognized technologies, such as mass-spectrometry based assays (e.g., iTRAQ, 2D-LC-MSMS, etc.).

### BRIEF DESCRIPTION OF THE DRAWINGS

[0118] FIG. 1: Illustration of the “Omics” Cascades.

[0119] FIG. 2: Illustration of the Interrogative Biology® Platform.

[0120] FIG. 3: Illustration of the Interrogative Biology® Platform.

[0121] FIG. 4A-4D: High level schematic illustration of the components and process for an AI-based informatics system that may be used with exemplary embodiments.

[0122] FIG. 5: Flow chart of process in AI-based informatics system that may be used with some exemplary embodiments.

[0123] FIG. 6: Schematic depicting an exemplary computing environment suitable for practicing exemplary embodiments taught herein.

[0124] FIG. 7: High level flow chart of an exemplary method, in accordance with some embodiments.

[0125] FIG. 8: Illustration of the experimental approach for identification of novel biomarkers of autism.

[0126] FIG. 9: Illustration of source of experimental samples for identification of novel biomarkers of autism.

[0127] FIG. 10: A global differential network with hubs/nodes unique in autism versus normal samples.

[0128] FIG. 11: A network of molecular entities driven by “disease state” common to Autism and Alzheimer's Disease.

[0129] FIG. 12: An exemplary causal molecular interaction network in autism.

[0130] FIG. 13: An exemplary sub-network with SPTAN1 as a critical hub in autism interaction network.

[0131] FIG. 14: An exemplary sub-network with GLUD1 as a critical hub in autism interaction network.

[0132] FIG. 15: An exemplary sub-network with CORO1A as a critical hub in autism interaction network.

### DETAILED DESCRIPTION OF THE INVENTION

[0133] Autism Spectrum Disorders (ASD) is a pervasive developmental disorder including a group of serious and enigmatic neuro-behavioral disorders. Autism is a complex neurodevelopmental disorder. The major characteristics of this disease are the impairment in social skills, difficulty to communicate, and restricted/repetitive behaviors. Currently, it is the third most common developmental disorder. The number of children diagnosed with autism has dramatically increased and now considered epidemic with current incidence of 1 in 110 children with a 4:1 male-female ratio. Although Autism does not affect the patient life-span, it could be a lifelong disorder. ASD has many suspected causes, including genetic mutations and/or deletions, mitochondria dysfunction, immunologic, diet, mercury poisoning and viral infections. Interesting, mitochondrial dysfunction has been shown to play a crucial role in the disease pathophysiology. As a multi-factorial disease, autism has a very diverse patient population under one spectrum. Due to the poor understanding of underlying molecular mechanisms of the disease, the current diagnosis is based on observational behavior variables, with no drug approved to treat autism specifically. Currently, there are no established molecular signatures or end-points used in the clinical environment for diagnosis. No biological markers have been validated to reliably diagnose autism in an individual patient. Therefore, the absence of biological markers for ASD is a major bottleneck to arbitrating diagnosis, and for developing drugs for the treatment and/or prevention of the disorder.

[0134] In the past, a significant effort has been placed on Autism genomics/genetics studies. To date, however, no validated biomarkers are available, no objective clinical test can be performed to help the clinicians, and there are no promising treatment to help autistic children and their families. It is possible that this lack of progress is due to the fact that when solely genetic/genomics studies are performed, a global understanding of the molecular mechanism underlying this disease is lost. It is possible that one needs to look at the differential molecular changes at all omic levels (e.g., genomic, proteomic, etc.), including the interactome, to gain a comprehensive understanding of the system of biology behind the autistic phenotypes.

[0135] Accordingly, Applicants describe and employ herein a novel approach combining the power of cell biology and multi-omics platforms in an Interrogative Discovery Platform Technology. The Interrogative Platform Technology integrates the data from in vitro and/or in vivo/clinical studies using artificial intelligence (AI) based on data-driven inference in order to mine the data and build bio-models. A schematic depicting the different “Omics” cascades employed in the Platform Technology is provided in FIG. 1. Schematics of the Interrogative Discovery Platform Technology are provided in FIGS. 2-3. This Interrogative Platform Technology is further described in application No. PCT/US2012/027615, the entire contents of which are expressly incorporated herein by reference. Applying the Platform Technology to a cell model system for pervasive developmental disorders has provided insight into the mechanism of pathophysiology of pervasive developmental disorders, and has generated candidate biomarkers as well as potential therapeutic targets and/or therapies/drugs. Candidate drugs/drug targets identified by using this Platform Technology naturally exist in the human body and, therefore, avoid the toxic effects of exogenous therapeutic agents.

### I. DEFINITIONS

[0136] As used herein, each of the following terms has the meaning associated with it in this section.

[0137] The articles “a” and “an” are used herein to refer to one or to more than one (i.e. to at least one) of the grammatical object of the article. By way of example, “an element” means one element or more than one element.

[0138] The term “including” is used herein to mean, and is used interchangeably with, the phrase “including but not limited to.”

[0139] The term “or” is used herein to mean, and is used interchangeably with, the term “and/or,” unless context clearly indicates otherwise.

[0140] The term “such as” is used herein to mean, and is used interchangeably, with the phrase “such as but not limited to.”

[0141] As used herein, the term “subject” or “patient” refers to either human and non-human animals, e.g., veterinary patients, preferably a mammal. The term “non-human animal” includes vertebrates, e.g., mammals, such as non-human primates, mice, rodents, rabbits, sheep, dogs, cats, horses, cows, ovine, canine, feline, equine or bovine species. In an embodiment, the subject is a human (e.g., a human with a pervasive developmental disorder). It should be noted that clinical observations described herein were made with human subjects and, in at least some embodiments, the subjects are human.

[0142] “Therapeutically effective amount” means the amount of a compound that, when administered to a patient for treating a disease, is sufficient to effect such treatment for the disease, e.g., the amount of such a substance that produces some desired local or systemic effect at a reasonable benefit/risk ratio applicable to any treatment. When administered for preventing a disease, the amount is sufficient to avoid or delay onset of the disease. The “therapeutically effective amount” will vary depending on the compound, its therapeutic index, solubility, the disease and its severity and the age, weight, etc., of the patient to be treated, and the like. For example, certain compounds discovered by the methods of the present invention may be administered in a sufficient amount to produce a reasonable benefit/risk ratio applicable to such treatment.

[0143] “Preventing” or “prevention” refers to a reduction in risk of acquiring a disease or disorder (i.e., causing at least one of the clinical symptoms of the disease not to develop in a patient that may be exposed to or predisposed to the disease but does not yet experience or display symptoms of the disease).

[0144] The term “prophylactic” or “therapeutic” treatment refers to administration to the subject of one or more of the subject compositions. If it is administered prior to clinical manifestation of the unwanted condition (e.g., disease or other unwanted state of the host animal) then the treatment is prophylactic, i.e., it protects the host against developing the unwanted condition, whereas if administered after manifestation of the unwanted condition, the treatment is therapeutic (i.e., it is intended to diminish, ameliorate or maintain the existing unwanted condition or side effects therefrom).

[0145] The term “therapeutic effect” refers to a local or systemic effect in animals, particularly mammals, and more particularly humans caused by a pharmacologically active substance. The term thus means any substance intended for use in the diagnosis, cure, mitigation, treatment or prevention of disease or in the enhancement of desirable physical or mental development and conditions in an animal or human.

[0146] By “patient” is meant any animal (e.g., a human or a non-human mammal), including horses, dogs, cats, pigs, goats, rabbits, hamsters, monkeys, guinea pigs, rats, mice, lizards, snakes, sheep, cattle, fish, and birds.

[0147] The terms “marker” or “biomarker” are used interchangeably herein to mean a substance that is used as an indicator of a biologic state, e.g., genes, messenger RNAs (mRNAs, microRNAs (miRNAs); heterogeneous nuclear RNAs (hnRNAs), and proteins, or portions thereof.

[0148] The “level of expression” or “expression pattern” refers to a quantitative or qualitative summary of the expression of one or more markers or biomarkers in a subject, such as in comparison to a standard or a control.

[0149] A “higher level of expression”, “higher level of activity”, “increased level of expression” or “increased level of activity” refers to an expression level and/or activity in a test sample that is greater than the standard error of the assay employed to assess expression and/or activity, and is preferably at least twice, and more preferably three, four, five or ten or more times the expression level and/or activity of the marker in a control sample (e.g., a sample from a healthy subject not afflicted with a pervasive developmental disorder) and preferably, the average expression level and/or activity of the marker in several control samples.

[0150] A “lower level of expression”, “lower level of activity”, “decreased level of expression” or “decreased level of activity” refers to an expression level and/or activity in a test sample that is greater than the standard error of the assay employed to assess expression and/or activity, but is preferably at least twice, and more preferably three, four, five or ten or more times less than the expression level of the marker in a control sample (e.g., a sample that has been calibrated directly or indirectly against a panel of pervasive developmental disorders with follow-up information which serve as a validation standard for prognostic ability of the marker) and preferably, the average expression level and/or activity of the marker in several control samples.

[0151] As used herein, “antibody” includes, by way of example, naturally-occurring forms of antibodies (e.g., IgG, IgA, IgM, IgE) and recombinant antibodies such as single-chain antibodies, chimeric and humanized antibodies and multi-specific antibodies, as well as fragments and derivatives of all of the foregoing, which fragments and derivatives have at least an antigenic binding site. Antibody derivatives may comprise a protein or chemical moiety conjugated to an antibody.

[0152] Reference to a gene encompasses naturally occurring or endogenous versions of the gene, including wild type, polymorphic or allelic variants or mutants (e.g., germline mutation, somatic mutation) of the gene, which can be found in a subject. In an embodiment, the sequence of the biomarker gene is at least about 80%, at least about 85%, at least about 90%, at least about 91%, at least about 92%, at least about 93%, at least about 94%, at least about 95%, at least about 96%, at least about 97%, at least about 98%, or at least about 99% identical to the sequence of a marker listed in Tables 2-6. Sequence identity can be determined, e.g., by comparing sequences using NCBI BLAST (e.g., Megablast with default parameters).

[0153] In an embodiment, the level of expression of one or more of the markers is determined relative to a control sample, such as the level of expression of the marker in normal tissue (e.g., a range determined from the levels of expression of the marker observed in normal tissue samples). In an embodiment, the level of expression of the marker is determined relative to a control sample, such as the level of expression of the marker in samples from healthy parents or siblings of a diseased subject, or the level of expression of the marker in samples from other healthy subjects. In another embodiment, the level of expression of the one or more markers is determined relative to a control sample, such as the level of expression of the one or more markers in samples from other subjects suffering from a pervasive developmental disorder. For example, the level of expression of one or more markers in Tables 2-6 in samples from other subjects can be determined to define levels of expression that correlate with sensitivity to a particular treatment, and the level of expression of the one or more markers in the sample from the subject of interest is compared to these levels of expression.

[0154] The term “known standard level” or “control level” refers to an accepted or pre-determined expression level of one or more markers, for example, one or more markers listed in Tables 2-6, which is used to compare the expression level of the one or more markers in a sample derived from a subject. In one embodiment, the control expression level of the marker is the average expression level of the marker in samples derived from a population of subjects, e.g., the average expression level of the marker in a population of subjects with a pervasive developmental disorder. In another embodiment, the population comprises a group of subjects who do not respond to a particular treatment, or a group of subjects who express the respective marker at high or normal levels. In another embodiment, the control level constitutes a range of expression of the marker in normal tissue. In another embodiment, the control level constitutes a range of expression of the marker in cells or plasma from a variety of subjects having a pervasive developmental disorder. In another embodiment, “control level” refers also to a pre-treatment level in a subject.

[0155] As further information becomes available as a result of routine performance of the methods described herein, population-average values for “control” level of expression of the markers of the present invention may be used. In other embodiments, the “control” level of expression of the markers may be determined by determining the expression level of the respective marker in a subject sample obtained from a subject before the suspected onset of a pervasive developmental disorder in the subject, from archived subject samples, from healthy parents or siblings of a diseased subject, and the like.

[0156] Control levels of expression of markers of the invention may be available from publicly available databases. In addition, Universal Reference Total RNA (Clontech Laboratories) and Universal Human Reference RNA (Stratagene) and the like can be used as controls. For example, qPCR can be used to determine the level of expression of a marker, and an increase in the number of cycles needed to detect expression of a marker in a sample from a subject, relative to the number of cycles needed for detection using such a control, is indicative of a low level of expression of the marker.

[0157] The term “sample” refers to cells, tissues or fluids obtained or isolated from a subject, as well as cells, tissues or fluids present within a subject. The term “sample” includes any body fluid, tissue or a cell or collection of cells from a subject, as well as any component thereof, such as a fraction or an extract. In one embodiment, the tissue or cell is removed from the subject. In another embodiment, the tissue or cell is present within the subject. In an embodiment, the fluid comprises amniotic fluid, aqueous humor, vitreous humor, bile, blood, breast milk, cerebrospinal fluid, cerumen, chyle, cystic fluid, endolymph, feces, gastric acid, gastric juice, lymph, mucus, nipple aspirates, pericardial fluid, perilymph, peritoneal fluid, plasma, pleural fluid, pus, saliva, sebum, semen, sweat, serum, sputum, synovial fluid, tears, urine, vaginal secretions, or fluid collected from a biopsy. In one embodiment, the sample contains protein (e.g., proteins or peptides) from the subject. In another embodiment, the sample contains RNA (e.g., mRNA) from the subject or DNA (e.g., genomic DNA molecules) from the subject.

[0158] “Primary treatment” as used herein, refers to the initial treatment of a subject afflicted with a pervasive developmental disorder.

[0159] A pervasive developmental disorder is “treated” if at least one symptom of the pervasive developmental disorder is expected to be or is alleviated, terminated, slowed, or prevented. As used herein, a pervasive developmental disorder is also “treated” if recurrence or severity of the pervasive developmental disorder is reduced, slowed, delayed, or prevented.

[0160] A kit is any manufacture (e.g. a package or container) comprising at least one reagent, e.g. a probe, for specifically detecting a marker of the invention, the manufacture being promoted, distributed, or sold as a unit for performing the methods of the present invention.

[0161] “Metabolic pathway” refers to a sequence of enzyme-mediated reactions that transform one compound to another and provide intermediates and energy for cellular functions. The metabolic pathway can be linear or cyclic.

[0162] “Metabolic state” refers to the molecular content of a particular cellular, multicellular or tissue environment at a given point in time as measured by various chemical and biological indicators as they relate to a state of health or disease.

[0163] The term “microarray” refers to an array of distinct polynucleotides, oligonucleotides, polypeptides (e.g., antibodies) or peptides synthesized on a substrate, such as paper, nylon or other type of membrane, filter, chip, glass slide, or any other suitable solid support.

[0164] Antibodies used in immunoassays to determine the level of expression of one or more markers of the invention, may be labeled with a detectable label. The term “labeled”, with regard to the probe or antibody, is intended to encompass direct labeling of the probe or antibody by incorporation of a label (e.g., a radioactive atom), coupling (i.e., physically linking) a detectable substance to the probe or antibody, as well as indirect labeling of the probe or antibody by reactivity with another reagent that is directly labeled. Examples of indirect labeling include detection of a primary antibody using a fluorescently labeled secondary antibody and end-labeling of a DNA probe with biotin such that it can be detected with fluorescently labeled streptavidin.

[0165] In one embodiment, the antibody is labeled, e.g. a radio-labeled, chromophore-labeled, fluorophore-labeled, or enzyme-labeled antibody. In another embodiment, an antibody derivative (e.g., an antibody conjugated with a substrate or with the protein or ligand of a protein-ligand pair (e.g., biotin-streptavidin), or an antibody fragment (e.g. a single-chain antibody, or an isolated antibody hypervariable domain) which binds specifically with the biomarker is used.

[0166] The terms “disorders” and “diseases” are used inclusively and refer to any deviation from the normal structure or function of any part, organ or system of the body (or any combination thereof). A specific disease is manifested by characteristic symptoms and signs, including biological, chemical and physical changes, and is often associated with a variety of other factors including, but not limited to, demographic, environmental, employment, genetic and medically historical factors. Certain characteristic signs, symptoms, and related factors can be quantitated through a variety of methods to yield important diagnostic information.

[0167] The term “expression” is used herein to mean the process by which a polypeptide is produced from DNA. The process involves the transcription of the gene into mRNA and the translation of this mRNA into a polypeptide. Depending on the context in which used, “expression” may refer to the production of RNA, protein or both.

[0168] The terms “level of expression of a gene” or “gene expression level” refer to the level of mRNA, as well as pre-mRNA nascent transcript(s), transcript processing intermediates, mature mRNA(s) and degradation products, or the level of protein, encoded by the gene in the cell.

[0169] The term “modulation” refers to upregulation (i.e., activation or stimulation), downregulation (i.e., inhibition or suppression) of a response, or the two in combination or apart. A “modulator” is a compound or molecule that modulates, and may be, e.g., an agonist, antagonist, activator, stimulator, suppressor, or inhibitor.

[0170] The term “genome” refers to the entirety of a biological entity's (cell, tissue, organ, system, organism) genetic information. It is encoded either in DNA or RNA (in certain viruses, for example). The genome includes both the genes and the non-coding sequences of the DNA.

[0171] The term “proteome” refers to the entire set of proteins expressed by a genome, a cell, a tissue, or an organism at a given time. More specifically, it may refer to the entire set of expressed proteins in a given type of cells or an organism at a given time under defined conditions. Proteome may include protein variants due to, for example, alternative splicing of genes and/or post-translational modifications (such as glycosylation or phosphorylation).

[0172] The term “transcriptome” refers to the entire set of transcribed RNA molecules, including mRNA, rRNA, tRNA, and other non-coding RNA produced in one or a population of cells at a given time. The term can be applied to the total set of transcripts in a given organism, or to the specific subset of transcripts present in a particular cell type. Unlike the genome, which is roughly fixed for a given cell line (excluding mutations), the transcriptome can vary with external environmental conditions. Because it includes all mRNA transcripts in the cell, the transcriptome reflects the genes that are being actively expressed at any given time, with the exception of mRNA degradation phenomena such as transcriptional attenuation.

[0173] The study of transcriptomics, also referred to as expression profiling, examines the expression level of mRNAs in a given cell population, often using high-throughput techniques based on DNA microarray technology.

[0174] The term “metabolome” refers to the complete set of small-molecule metabolites (such as metabolic intermediates, hormones and other signalling molecules, and secondary metabolites) to be found within a biological sample, such as a single organism, at a given time under a given condition. The metabolome is dynamic, and may change from second to second.

[0175] The term “interactome” refers to the whole set of molecular interactions in a biological system under study (e.g., cells). It can be displayed as a directed graph. Molecular interactions can occur between molecules belonging to different biochemical families (proteins, nucleic acids, lipids, carbohydrates, etc.) and also within a given family. When spoken in terms of proteomics, interactome refers to protein-protein interaction network(PPI), or protein interaction network (PIN). Another extensively studied type of interactome is the protein-DNA interactome (network formed by transcription factors (and DNA or chromatin regulatory proteins) and their target genes.

[0176] The term “cellular output” includes a collection of parameters, preferably measurable parameters, relating to cellullar status, including (without limiting): level of transcription for one or more genes (e.g., measurable by RT-PCR, qPCR, microarray, etc.), level of expression for one or more proteins (e.g., measurable by mass spectrometry or Western blot), absolute activity (e.g., measurable as substrate conversion rates) or relative activity (e.g., measurable as a % value compared to maximum activity) of one or more enzymes or proteins, level of one or more metabolites or intermediates, level of oxidative phosphorylation (e.g., measurable by Oxigen Consumption Rate or OCR), level of glycolysis (e.g., measurable by Extra Cellular Acidification Rate or ECAR), extent of ligand-target binding or interaction, activity of extracellular secreted molecules, etc. The cellular output may include data for a pre-determined number of target genes or proteins, etc., or may include a global assessment for all detectable genes or proteins. For example, mass spectrometry may be used to identify and/or quantitate all detectable proteins expressed in a given sample or cell population, without prior knowledge as to whether any specific protein may be expressed in the sample or cell population.

[0177] As used herein, a “cell system” includes a population of homogeneous or heterogeneous cells. The cells within the system may be growing in vivo, under the natural or physiological environment, or may be growing in vitro in, for example, controlled tissue culture environments. The cells within the system may be relatively homogeneous (e.g., no less than 70%, 80%, 90%, 95%, 99%, 99.5%, 99.9% homogeneous), or may contain two or more cell types, such as cell types usually found to grow in close proximity in vivo, or cell types that may interact with one another in vivo through, e.g., paracrine or other long distance inter-cellular communication. The cells within the cell system may be derived from established cell lines, including pervasive developmental disorder cell lines, immortal cell lines, or normal cell lines, or may be primary cells or cells freshly isolated from live tissues or organs.

[0178] Cells in the cell system are typically in contact with a “cellular environment” that may provide nutrients, gases (oxygen or CO₂, etc.), chemicals, or proteinaceous/non-proteinaceous stimulants that may define the conditions that affect cellular behavior. The cellular environment may be a chemical media with defined chemical components and/or less well-defined tissue extracts or serum components, and may include a specific pH, CO₂ content, pressure, and temperature under which the cells grow. Alternatively, the cellular environment may be the natural or physiological environment found in vivo for the specific cell system.

[0179] In certain embodiments, a cellular environment for a specific cell system also include certain cell surface features of the cell system, such as the types of receptors or ligands on the cell surface and their respective activities, the structure of carbohydrate or lipid molecules, membrane polarity or fluidity, status of clustering of certain membrane proteins, etc. These cell surface features may affect the function of nearby cells, such as cells belonging to a different cell system. In certain other embodiments, however, the cellular environment of a cell system does not include cell surface features of the cell system.

[0180] The cellular environment may be altered to become a “modified cellular environment.” Alterations may include changes (e.g., increase or decrease) in any one or more component found in the cellular environment, including addition of one or more “external stimulus component” to the cellular environment. The external stimulus component may be endogenous to the cellular environment (e.g., the cellular environment contains some levels of the stimulant, and more of the same is added to increase its level), or may be exogenous to the cellular environment (e.g., the stimulant is largely absent from the cellular environment prior to the alteration). The cellular environment may further be altered by secondary changes resulting from adding the external stimulus component, since the external stimulus component may change the cellular output of the cell system, including molecules secreted into the cellular environment by the cell system.

[0181] As used herein, “external stimulus component” include any external physical and/or chemical stimulus that may affect cellular function. This may include any large or small organic or inorganic molecules, natural or synthetic chemicals, temperature shift, pH change, radiation, light (UVA, UVB etc.), microwave, sonic wave, electrical current, modulated or unmodulated magnetic fields, etc.

[0182] Merely to illustrate, the subject external stimulus component may include a therapeutic agent or a candidate therapeutic agent for treating a disease condition, including chemotherapeutic agent, protein-based biological drugs, antibodies, fusion proteins, small molecule drugs, lipids, polysaccharides, nucleic acids, etc.

[0183] In other embodiments, the external stimulus component may be one or more stress factors, such as those typically encountered in vivo under the various disease conditions, including hypoxia, hyperglycemic conditions, acidic environment (that may be mimicked by lactic acid treatment), etc.

[0184] In certain situations, where interaction between two or more cell systems are desired to be investigated, a “cross-talking cell system” may be formed by, for example, bringing the modified cellular environment of a first cell system into contact with a second cell system to affect the cellular output of the second cell system.

[0185] As used herein, “cross-talk cell system” comprises two or more cell systems, in which the cellular environment of at least one cell system comes into contact with a second cell system, such that at least one cellular output in the second cell system is changed or affected. In certain embodiments, the cell systems within the cross-talk cell system may be in direct contact with one another. In other embodiments, none of the cell systems are in direct contact with one another.

[0186] For example, in certain embodiments, the cross-talk cell system may be in the form of a transwell, in which a first cell system is growing in an insert and a second cell system is growing in a corresponding well compartment. The two cell systems may be in contact with the same or different media, and may exchange some or all of the media components. External stimulus component added to one cell system may be substantially absorbed by one cell system and/or degraded before it has a chance to diffuse to the other cell system. Alternatively, the external stimulus component may eventually approach or reach an equilibrium within the two cell systems.

[0187] In certain embodiments, the cross-talk cell system may adopt the form of separately cultured cell systems, where each cell system may have its own medium and/or culture conditions (temperature, CO₂ content, pH, etc.), or similar or identical culture conditions. The two cell systems may come into contact by, for example, taking the conditioned medium from one cell system and bringing it into contact with another cell system. Direct cell-cell contacts between the two cell systems can also be effected if desired. For example, the cells of the two cell systems may be co-cultured at any point if desired, and the co-cultured cell systems can later be separated by, for example, FACS sorting when cells in at least one cell system have a sortable marker or label (such as a stably expressed fluorescent marker protein GFP).

[0188] Similarly, in certain embodiments, the cross-talk cell system may simply be a co-culture. Selective treatment of cells in one cell system can be effected by first treating the cells in that cell system, before culturing the treated cells in co-culture with cells in another cell system. The co-culture cross-talk cell system setting may be helpful when it is desired to study, for example, effects on a second cell system caused by cell surface changes in a first cell system, after stimulation of the first cell system by an external stimulus component.

[0189] The cross-talk cell system of the invention is particularly suitable for exploring the effect of certain pre-determined external stimulus component on the cellular output of one or both cell systems. The primary effect of such a stimulus on the first cell system (with which the stimulus directly contact) may be determined by comparing cellular outputs (e.g., protein expression level) before and after the first cell system's contact with the external stimulus, which, as used herein, may be referred to as “(significant) cellular output differentials.” The secondary effect of such a stimulus on the second cell system, which is mediated through the modified cellular environment of the first cell system (such as it secretome), can also be similarly measured. There, a comparison in, for example, proteome of the second cell system can be made between the proteome of the second cell system with the external stimulus treatment on the first cell system, and the proteome of the second cell system without the external stimulus treatment on the first cell system. Any significant changes observed (in proteome or any other cellular outputs of interest) may be referred to as a “significant cellular cross-talk differential.”

[0190] In making cellular output measurements (such as protein expression), either absolute expression amount of relative expression level may be used. For example, to determine the relative protein expression level of a second cell system, the amount of any given protein in the second cell system, with or without the external stimulus to the first cell system, may be compared to a suitable control cell line and mixture of cell lines and given a fold-increase or fold-decrease value. A pre-determined threshold level for such fold-increase (e.g., at least 1.5 fold increase) or fold-decrease (e.g., at least a decrease to 0.75 fold or 75%) may be used to select significant cellular cross-talk differentials.

[0191] To illustrate, in one exemplary two-cell system established to imitate aspects of a cardiovascular disease model, a heart smooth muscle cell line (first cell system) may be treated with a hypoxia condition (an external stimulus component), and proteome changes in a kidney cell line (second cell system) resulting from contacting the kidney cells with conditioned medium of the heart smooth muscle may be measured using conventional quantitative mass spectrometry. Significant cellular cross-talking differentials in these kidney cells may be determined, based on comparison with a proper control (e.g., similarly cultured kidney cells contacted with conditioned medium from similarly cultured heart smooth muscle cells not treated with hypoxia conditions).

[0192] Not every observed significant cellular cross-talking differentials may be of biological significance. With respect to any given biological system for which the subject interrogative biological assessment is applied, some (or maybe all) of the significant cellular cross-talking differentials may be “determinative” with respect to the specific biological problem at issue, e.g., either responsible for causing a disease condition (a potential target for therapeutic intervention) or is a biomarker for the disease condition (a potential diagnostic or prognostic factor).

[0193] Such determinative cross-talking differentials may be selected by an end user of the subject method, or it may be selected by a bioinformatics software program, such as DAVID-enabled comparative pathway analysis program, or the KEGG pathway analysis program. In certain embodiments, more than one bioinformatics software program is used, and consensus results from two or more bioinformatics software programs are preferred.

[0194] As used herein, “differentials” of cellular outputs include differences (e.g., increased or decreased levels) in any one or more parameters of the cellular outputs. For example, in terms of protein expression level, differentials between two cellular outputs, such as the outputs associated with a cell system before and after the treatment by an external stimulus component, can be measured and quantitated by using art-recognized technologies, such as mass-spectrometry based assays (e.g., iTRAQ, 2D-LC-MSMS, etc.).

[0195] As used herein, an “interrogative biological assessment” may include the identification of one or more determinative cellular cross-talk differentials (e.g., an increase or decrease in activity of a biological pathway, or key members of the pathway, or key regulators to members of the pathway) associated with the external stimulus component. It may further include additional steps designed to test or verify whether the identified determinative cellular cross-talk differentials are necessary and/or sufficient for the downstream events associated with the initial external stimulus component, including in vivo animal models and/or in vitro tissue culture experiments.

[0196] Reference will now be made in detail to exemplary embodiments of the invention. While the invention will be described in conjunction with the exemplary embodiments, it will be understood that it is not intended to limit the invention to those embodiments. To the contrary, it is intended to cover alternatives, modifications, and equivalents as may be included within the spirit and scope of the invention as defined by the appended claims.

### II. OVERVIEW OF INTERROGATIVE BIOLOGY PLATFORM TECHNOLOGY

[0197] Exemplary embodiments of the present invention incorporate methods that may be performed using an interrogative biology platform (“the Platform”) that is a tool for understanding a wide variety of biological processes, such as disease pathophysiology, and the key molecular drivers underlying such biological processes, including factors that enable a disease process. Some exemplary embodiments include systems that may incorporate at least a portion of, or all of, the Platform. Some exemplary methods may employ at least some of, or all of the Platform. Goals and objectives of some exemplary embodiments involving the platform are generally outlined below for illustrative purposes:

[0198] i) to create specific molecular signatures as drivers of critical components of the disease process (e.g., pervasive developmental disorder) as they relate to overall pathophysiology of the disease process;

[0199] ii) to generate molecular signatures or differential maps pertaining to the disease process, e.g., pervasive developmental disorder, which may help to identify differential molecular signatures that distinguishes the disease state versus a different state (e.g., a normal state), and develop understanding of signatures or molecular entities as they arbitrate mechanisms of change between the two states (e.g., from normal to disease state); and,

[0200] iii) to investigate the role of “hubs” of molecular activity as potential intervention targets for external control of the disease, e.g., pervasive developmental disorder, (e.g., to use the hub as a potential therapeutic target), or as potential bio-markers for the disease, e.g., pervasive developmental disorder, in question (e.g., disease specific biomarkers, in prognostic and/or theranostics uses).

[0201] Some exemplary methods involving the Platform may include one or more of the following features:

[0202] 1) modeling the biological process (e.g., disease process) and/or components of the biological process (e.g., disease physiology & pathophysiology) in one or more models, preferably in vitro models, using cells associated with the biological process. For example, the cells may be human derived cells which normally participate in the biological process in question. The model may include various cellular cues/conditions/perturbations that are specific to the biological process (e.g., disease). Ideally, the model represents various (disease) states and flux components, instead of a static assessment of the biological (disease) condition.

[0203] 2) profiling mRNA and/or protein signatures using any art-recognized means. For example, quantitative polymerase chain reaction (qPCR) & proteomics analysis tools such as Mass Spectrometry (MS). Such mRNA and protein data sets represent biological reaction to environment/perturbation. Where applicable and possible, lipidomics, metabolomics, and transcriptomics data may also be integrated as supplemental or alternative measures for the biological process in question. SNP analysis is another component that may be used at times in the process. It may be helpful for investigating, for example, whether the SNP or a specific mutation has any effect on the biological process. These variables may be used to describe the biological process, either as a static “snapshot,” or as a representation of a dynamic process.

[0204] 3) assaying for one or more cellular responses to cues and perturbations, including but not limited to bioenergetics profiling, cell proliferation, apoptosis, and organellar function. True genotype-phenotype association is actualized by employment of functional models, such as ATP, ROS, OXPHOS, Seahorse assays, etc. Such cellular responses represent the reaction of the cells in the biological process (or models thereof) in response to the corresponding state(s) of the mRNA/protein expression, and any other related states in 2) above.

[0205] 4) integrating functional assay data thus obtained in 3) with proteomics and other data obtained in 2), and determining protein associations as driven by causality, by employing artificial intelligence based (AI-based) informatics system or platform. Such an AI-based system is based on, and preferably based only on, the data sets obtained in 2) and/or 3), without resorting to existing knowledge concerning the biological process. Preferably, no data points are statistically or artificially cut-off. Instead, all obtained data is fed into the AI-system for determining protein associations. One goal or output of the integration process is one or more differential networks (otherwise may be referred to herein as “delta networks,” or, in some cases, “delta-delta networks” as the case may be) between the different biological states (e.g., disease vs. normal states).

[0206] 5) profiling the outputs from the AI-based informatics platform to explore each hub of activity as a potential therapeutic target and/or biomarker. Such profiling can be done entirely in silico based on the obtained data sets, without resorting to any actual wet-lab experiments.

[0207] 6) validating hub of activity by employing molecular and cellular techniques. Such post-informatic validation of output with wet-lab cell-based experiments may be optional, but they help to create a full-circle of interrogation.

[0208] Any or all of the approaches outlined above may be used in any specific application concerning any biological process, depending, at least in part, on the nature of the specific application. That is, one or more approaches outlined above may be omitted or modified, and one or more additional approaches may be employed, depending on specific application.

[0209] A schematic representation of the components of the platform including data collection, data integration, and data mining is depicted in FIG. 2. A schematic representation of a systematic interrogation and collection of response data from the “omics” cascade is depicted in FIG. 1.

[0210] FIG. 7 is a high level flow chart of an exemplary method, in which components of an exemplary system that may be used to perform the exemplary method are indicated. Initially, a model (e.g., an in vitro model) is established for a biological process (e.g., a disease process) and/or components of the biological process (e.g., disease physiology and pathophysiology) using cells normally associated with the biological process (step 12). For example, the cells may be human-derived cells that normally participate in the biological process (e.g., disease). The cell model may include various cellular cues, conditions, and/or perturbations that are specific to the biological process (e.g., disease). Ideally, the cell model represents various (disease) states and flux components of the biological process (e.g., disease), instead of a static assessment of the biological process. The comparison cell model may include control cells or normal (e.g., non-diseased) cells. Additional description of the cell models appears below in sections IV.A.

[0211] A first data set is obtained from the cell model for the biological process, which includes information representing expression levels of a plurality of genes (e.g., mRNA and/or protein signatures) (step 16) using any known process or system (e.g., quantitative polymerase chain reaction (qPCR) & proteomics analysis tools such as Mass Spectrometry (MS)).

[0212] A third data set is obtained from the comparison cell model for the biological process (step 18). The third data set includes information representing expression levels of a plurality of genes in the comparison cells from the comparison cell model.

[0213] In certain embodiments of the methods of the invention, these first and third data sets are collectively referred to herein as a “first data set” that represents expression levels of a plurality of genes in the cells (all cells including comparison cells) associated with the biological system.

[0214] The first data set and third data set may be obtained from one or more mRNA and/or Protein Signature Analysis System(s). The mRNA and protein data in the first and third data sets may represent biological reactions to environment and/or perturbation. Where applicable and possible, lipidomics, metabolomics, and transcriptomics data may also be integrated as supplemental or alternative measures for the biological process. The SNP analysis is another component that may be used at times in the process. It may be helpful for investigating, for example, whether a single-nucleotide polymorphism (SNP) or a specific mutation has any effect on the biological process. The data variables may be used to describe the biological process, either as a static “snapshot,” or as a representation of a dynamic process. Additional description regarding obtaining information representing expression levels of a plurality of genes in cells appears below in section IV.B.

[0215] In certain embodiments, a second data set is obtained from the cell model for the biological process, which includes information representing a functional activity or response of cells (step 20). Similarly, in certain embodiments, a fourth data set is obtained from the comparison cell model for the biological process, which includes information representing a functional activity or response of the comparison cells (step 22).

[0216] In certain embodiments of the methods of the invention, these second and fourth data sets are collectively referred to herein as a “second data set” that represents a functional activity or a cellular response of the cells (all cells including comparison cells) associated with the biological system.

[0217] One or more functional assay systems may be used to obtain information regarding the functional activity or response of cells or of comparison cells. The information regarding functional cellular responses to cues and perturbations may include, but is not limited to, bioenergetics profiling, cell proliferation, apoptosis, and organellar function. Functional models for processes and pathways (e.g., adenosine triphosphate (ATP), reactive oxygen species (ROS), oxidative phosphorylation (OXPHOS), Seahorse assays, etc.,) may be employed to obtain true genotype-phenotype association. The functional activity or cellular responses represent the reaction of the cells in the biological process (or models thereof) in response to the corresponding state(s) of the mRNA/protein expression, and any other related applied conditions or perturbations. Additional information regarding obtaining information representing functional activity or response of cells is provided below in section IV.B.

[0218] The method also includes generating computer-implemented models of the biological processes in the cells and in the control cells. For example, one or more (e.g., an ensemble of) Bayesian networks of causal relationships between the expression level of the plurality of genes and the functional activity or cellular response may be generated for the cell model (the “generated cell model networks”) from the first data set and the second data set (step 24). The generated cell model networks, individually or collectively, include quantitative probabilistic directional information regarding relationships. The generated cell model networks are not based on known biological relationships between gene expression and/or functional activity or cellular response, other than information from the first data set and second data set. The one or more generated cell model networks may collectively be referred to as a consensus cell model network.

[0219] One or more (e.g., an ensemble of) Bayesian networks of causal relationships between the expression level of the plurality of genes and the functional activity or cellular response may be generated for the comparison cell model (the “generated comparison cell model networks”) from the first data set and the second data set (step 26). The generated comparison cell model networks, individually or collectively, include quantitative probabilistic directional information regarding relationships. The generated cell networks are not based on known biological relationships between gene expression and/or functional activity or cellular response, other than the information in the first data set and the second data set. The one or more generated comparison model networks may collectively be refered to as a consensus cell model network.

[0220] The generated cell model networks and the generated comparison cell model networks may be created using an artificial intelligence based (AI-based) informatics platform. Further details regarding the creation of the generated cell model networks, the creation of the generated comparison cell model networks and the AI-based informatics system appear below in section IV.C.

[0221] It should be noted that many different AI-based platforms or systems may be employed to generate the Bayesian networks of causal relationships including quantitative probabilistic directional information. Although certain examples described herein employ one specific commercially available system, i.e., REFS™ (Reverse Engineering/Forward Simulation) from GNS (Cambridge, Mass.), embodiments are not limited. AI-Based Systems or Platforms suitable to implement some embodiments employ mathematical algorithms to establish causal relationships among the input variables (e.g., the first and second data sets), based only on the input data without taking into consideration prior existing knowledge about any potential, established, and/or verified biological relationships.

[0222] For example, the REFS™ AI-based informatics platform utilizes experimentally derived raw (original) or minimally processed input biological data (e.g., genetic, genomic, epigenetic, proteomic, metabolomic, and clinical data), and rapidly performs trillions of calculations to determine how molecules interact with one another in a complete system. The REFS™ AI-based informatics platform performs a reverse engineering process aimed at creating an in silico computer-implemented cell model (e.g., generated cell model networks), based on the input data, that quantitatively represents the underlying biological system. Further, hypotheses about the underlying biological system can be developed and rapidly simulated based on the computer-implemented cell model, in order to obtain predictions, accompanied by associated confidence levels, regarding the hypotheses.

[0223] With this approach, biological systems are represented by quantitative computer-implemented cell models in which “interventions” are simulated to learn detailed mechanisms of the biological system (e.g., disease), effective intervention strategies, and/or clinical biomarkers that determine which patients will respond to a given treatment regimen. Conventional bioinformatics and statistical approaches, as well as approaches based on the modeling of known biology, are typically unable to provide these types of insights.

[0224] After the generated cell model networks and the generated comparison cell model networks are created, they are compared. One or more causal relationships present in at least some of the generated cell model networks, and absent from, or having at least one significantly different parameter in, the generated comparison cell model networks are identified (step 28). Such a comparison may result in the creation of a differential network. The comparison, identification, and/or differential (delta) network creation may be conducted using a differential network creation module, which is described in further detail below in section IV.D.

[0225] In some embodiments, input data sets are from one cell type and one comparison cell type, which creates an ensemble of cell model networks based on the one cell type and another ensemble of comparison cell model networks based on the one comparison control cell type. A differential may be performed between the ensemble of networks of the one cell type and the ensemble of networks of the comparison cell type(s).

[0226] In other embodiments, input data sets are from multiple cell types and multiple comparison cell types. An ensemble of cell model networks may be generated for each cell types and each comparison cell type individually, and/or data from the multiple cell types and the multiple comparison cell types may be combined into respective composite data sets. The composite data sets produce an ensemble of networks corresponding to the multiple cell types (composite data) and another ensemble of networks corresponding to the multiple comparison cell types (comparison composite data). A differential may be performed on the ensemble of networks for the composite data as compared to the ensemble of networks for the comparison composite data.

[0227] In some embodiments, a differential may be performed between two different differential networks. This output may be referred to as a delta-delta network.

[0228] Quantitative relationship information may be identified for each relationship in the generated cell model networks (step 30). Similarly, quantitative relationship information for each relationship in the generated comparison cell model networks may be identified (step 32). The quantitative information regarding the relationship may include a direction indicating causality, a measure of the statistical uncertainty regarding the relationship (e.g., an Area Under the Curve (AUC) statistical measurement), and/or an expression of the quantitative magnitude of the strength of the relationship (e.g., a fold). The various relationships in the generated cell model networks may be profiled using the quantitative relationship information to explore each hub of activity in the networks as a potential therapeutic target and/or biomarker. Such profiling can be done entirely in silico based on the results from the generated cell model networks, without resorting to any actual wet-lab experiments.

[0229] In some embodiments, a hub of activity in the networks may be validated by employing molecular and cellular techniques. Such post-informatic validation of output with wet-lab cell based experiments need not be performed, but it may help to create a full-circle of interrogation. FIG. 4 schematically depicts a simplified high level representation of the functionality of an exemplary AI-based informatics system (e.g., REFS™ AI-based informatics system) and interactions between the AI-based system and other elements or portions of an interrogative biology platform (“the Platform”). In FIG. 4A, various data sets obtained from a model for a biological process (e.g., a disease model), such as drug dosage, treatment dosage, protein expression, mRNA expression, and any of many associated functional measures (such as OCR, ECAR) are fed into an AI-based system. As shown in FIG. 4B, from the input data sets, the AI-system creates a library of “network fragments” that includes variables (proteins, lipids and metabolites) that drive molecular mechanisms in the biological process (e.g., disease), in a process referred to as Bayesian Fragment Enumeration (FIG. 4B).

[0230] In FIG. 4C, the AI-based system selects a subset of the network fragments in the library and constructs an initial trial network from the fragments. The AI-based system also selects a different subset of the network fragments in the library to construct another initial trial network. Eventually an ensemble of initial trial networks are created (e.g., 1000 networks) from different subsets of network fragments in the library. This process may be termed parallel ensemble sampling. Each trial network in the ensemble is evolved or optimized by adding, subtracting and/or substitution additional network fragments from the library. If additional data is obtained, the additional data may be incorporated into the network fragments in the library and may be incorporated into the ensemble of trial networks through the evolution of each trial network. After completion of the optimization/evolution process, the ensemble of trial networks may be described as the generated cell model networks.

[0231] As shown in FIG. 4D, the ensemble of generated cell model networks may be used to simulate the behavior of the biological system. The simulation may be used to predict behavior of the biological system to changes in conditions, which may be experimentally verified using wet-lab cell-based, or animal-based, experiments. Also, quantitative parameters of relationships in the generated cell model networks may be extracted using the simulation functionality by applying simulated perturbations to each node individually while observing the effects on the other nodes in the generated cell model neworks. Further detail is provided below in section IV.C.

[0232] The automated reverse engineering process of the AI-based informatics system creates an ensemble of generated cell model networks networks that is an unbiased and systematic computer-based model of the cells.

[0233] The reverse engineering determines the probabilistic directional network connections between the molecular measurements in the data, and the phenotypic outcomes of interest. The variation in the molecular measurements enables learning of the probabilistic cause and effect relationships between these entities and changes in endpoints. The machine learning nature of the platform also enables cross training and predictions based on a data set that is constantly evolving.

[0234] The network connections between the molecular measurements in the data are “probabilistic,” partly because the connection may be based on correlations between the observed data sets “learned” by the computer algorithm. For example, if the expression level of protein X and that of protein Y are positively or negatively correlated, based on statistical analysis of the data set, a causal relationship may be assigned to establish a network connection between proteins X and Y. The reliability of such a putative causal relationship may be further defined by a likelihood of the connection, which can be measured by p-value (e.g., p<0.1, 0.05, 0.01, etc).

[0235] The network connections between the molecular measurements in the data are “directional,” partly because the network connections between the molecular measurements, as determined by the reverse-engineering process, reflects the cause and effect of the relationship between the connected gene/protein, such that raising the expression level of one protein may cause the expression level of the other to rise or fall, depending on whether the connection is stimulatory or inhibitory.

[0236] The network connections between the molecular measurements in the data are “quantitative,” partly because the network connections between the molecular measurements, as determined by the process, may be simulated in silico, based on the existing data set and the probabilistic measures associated therewith. For example, in the established network connections between the molecular measurements, it may be possible to theoretically increase or decrease (e.g., by 1, 2, 3, 5, 10, 20, 30, 50,100-fold or more) the expression level of a given protein (or a “node” in the network), and quantitatively simulate its effects on other connected proteins in the network.

[0237] The network connections between the molecular measurements in the data are “unbiased,” at least partly because no data points are statistically or artificially cut-off, and partly because the network connections are based on input data alone, without referring to pre-existing knowledge about the biological process in question.

[0238] The network connections between the molecular measurements in the data are “systemic” and (unbiased), partly because all potential connections among all input variables have been systemically explored, for example, in a pair-wise fashion. The reliance on computing power to execute such systemic probing exponentially increases as the number of input variables increases.

[0239] In general, an ensemble of ˜1,000 networks is usually sufficient to predict probabilistic causal quantitative relationships among all of the measured entities. The ensemble of networks captures uncertainty in the data and enables the calculation of confidence metrics for each model prediction. Predictions generated using the ensemble of networks together, where differences in the predictions from individual networks in the ensemble represent the degree of uncertainty in the prediction. This feature enables the assignment of confidence metrics for predictions of clinical response generated from the model.

[0240] Once the models are reverse-engineered, further simulation queries may be conducted on the ensemble of models to determine key molecular drivers for the biological process in question, such as a disease condition.

### III. EXEMPLARY STEPS AND COMPONENTS OF THE PLATFORM TECHNOLOGY

[0241] For illustration purpose only, the following steps of the subject Platform Technology may be described herein below for integrating data obtained from a custom built pervasive developmental disorder model, and for identifying novel proteins/pathways driving the pathogenesis of pervasive developmental disorder. Relational maps resulting from this analysis provides pervasive developmental disorder treatment targets, as well as diagnostic/prognostic markers associated with pervasive developmental disorder. Methods described here are described in further detail in U.S. Ser. No. 13/411,460, the entire contents of which are expressly incorporated herein by reference.

[0242] In addition, although the description below is presented in some portions as discrete steps, it is for illustration purpose and simplicity, and thus, in reality, it does not imply such a rigid order and/or demarcation of steps. Moreover, the steps of the invention may be performed separately, and the invention provided herein is intended to encompass each of the individual steps separately, as well as combinations of one or more (e.g., any one, two, three, four, five, six or all seven steps) steps of the subject Platform Technology, which may be carried out independently of the remaining steps.

[0243] The invention also is intended to include all aspects of the Platform Technology as separate components and embodiments of the invention. For example, the generated data sets are intended to be embodiments of the invention. As further examples, the generated causal relationship networks, generated consensus causal relationship networks, and/or generated simulated causal relationship networks, are also intended to be embodiments of the invention. The causal relationships identified as being unique in a pervasive developmental disorder are intended to be embodiments of the invention. Further, the custom built models for a pervasive developmental disorder are also intended to be embodiments of the invention.

[0244] A. Custom Model Building

[0245] The first step in the Platform Technology is the establishment of a model for a biological system or process, e.g., a pervasive developmental disorder. An example of a pervasive developmental disorder is autism. As any other complicated biological process or system, autism is a complicated pathological condition characterized by multiple unique aspects. For example, mitochondrial dysfunction may play a crucial role in the autism disease pathophysiology. As a result, autism cells may react differently to an environmental perturbation associated with mitochondrial functions, such as treatment by a potential drug, as compared to the reaction by a normal cell in response to the same treatment. Thus, it would be of interest to decipher autism's unique responses to drug treatment as compared to the responses of normal cells. To this end, a custom autism model may be established to simulate the environment of a cell associated with the autism disorder, e.g., lymphoblasts or other bodily fluid (e.g. serum or urine) samples from autism patients. Environmental perturbations associated with mitochondrial functions, e.g. CoQ10, can be applied to treat the autism cells. Mitochondrial function assays, e.g ATP and/or ROS, can be employed to provide insightful biological readout.

[0246] Individual conditions reflecting different aspects or characteristics of a pervasive developmental disorder may be investigated separately in the custom built pervasive developmental disorder model, and/or may be combined together. In one embodiment, combinations of at least 2, 3, 4, 5, 6, 7, 8, 9, 10, 15, 20, 25, 30, 40, 50 or more conditions reflecting or simulating different aspects of pervasive developmental disorder are investigated in the custom built pervasive developmental disorder model. In one embodiment, individual conditions and, in addition, combinations of at least 2, 3, 4, 5, 6, 7, 8, 9, 10, 15, 20, 25, 30, 40, 50 or more of the conditions reflecting or simulating different aspects of pervasive developmental disorder are investigated in the custom built pervasive developmental disorder model. All values presented in the foregoing list can also be the upper or lower limit of ranges, that are intended to be a part of this invention, e.g., between 1 and 5, 1 and 10, 1 and 20, 1 and 30, 2 and 5, 2 and 10, 5 and 10, 1 and 20, 5 and 20, 10 and 20, 10 and 25, 10 and 30 or 10 and 50 different conditions.

[0247] As a control one or more normal cell lines (e.g., cells obtained from normal, unaffected subjects, e.g., normal, unaffected subjects that are family members of a subject suffering from a pervastive developmental disorder and from which the cells associated with a pervasive developmental disorder are obtained) are cultured under similar conditions in order to identify proteins or pathways unique to a pervasive developmental disorder (see below).

[0248] Multiple cell types from the same subject afflicted with or suffering from a pervasive developmental disorder, e.g., lymphoblasts and cells derived from the central nervous system, or cells from mutliple different subjects afflicted with or suffering from a pervasive developmental disorder, may be included in the pervasive developmental disorder model. In certain situations, cross talk or ECS experiments between different cells associated with a pervasive developmental disorder model may be conducted for several inter-related purposes.

[0249] In some embodiments that involve cross talk, experiments conducted on the cell models are designed to determine modulation of cellular state or function of one cell system or population (e.g., lymphoblasts) by another cell system or population (e.g., cells derived from the central nervous system), optionally under defined treatment conditions. According to a typical setting, a first cell system/population is contacted by an external stimulus components, such as a candidate molecule (e.g., a small drug molecule, a protein) or a candidate condition (e.g., hypoxia, high glucose environment). In response, the first cell system/population changes its transcriptome, proteome, metabolome, and/or interactome, leading to changes that can be readily detected both inside and outside the cell. For example, changes in transcriptome can be measured by the transcription level of a plurality of target mRNAs; changes in proteome can be measured by the expression level of a plurality of target proteins; and changes in metabolome can be measured by the level of a plurality of target metabolites by assays designed specifically for given metabolites. Alternatively, the above referenced changes in metabolome and/or proteome, at least with respect to certain secreted metabolites or proteins, can also be measured by their effects on the second cell system/population, including the modulation of the transcriptome, proteome, metabolome, and interactome of the second cell system/population. Therefore, the experiments can be used to identify the effects of the molecule(s) of interest secreted by the first cell system/population on a second cell system/population under different treatment conditions. The experiments can also be used to identify any proteins that are modulated as a result of signaling from the first cell system (in response to the external stimulus component treatment) to another cell system, by, for example, differential screening of proteomics. The same experimental setting can also be adapted for a reverse setting, such that reciprocal effects between the two cell systems can also be assessed. In general, for this type of experiment, the choice of cell line pairs is largely based on the factors such as origin, disease state and cellular function.

[0250] Although two-cell systems are typically involved in this type of experimental setting, similar experiments can also be designed for more than two cell systems by, for example, immobilizing each distinct cell system on a separate solid support.

[0251] Once the custom model is built, one or more “perturbations” may be applied to the system, such as genetic variation from patient to patient, or with/without treatment by certain drugs or pro-drugs. The effects of such perturbations to the system, including the effect on pervasive developmental disorder related cells, and normal control cells, can be measured using various art-recognized or proprietary means, as described in section IV.B below.

[0252] In an exemplary embodiment, cell lines derived from one or more subjects afflicted with a pervasive developmental disorder, e.g., autism, and control, e.g., normal cells, e.g., cells derived from unaffected subjects, such as one or more unaffected family members related to the subject afflicted with a pervasive developmental disorder, are used. In one embodiment, the cells are treated with or without an environmemental perburbation, e.g., treatment with Coenzyme Q10.

[0253] The custom built pervasive developmental disorder model may be established and used throughout the steps of the Platform Technology of the invention to ultimately identify a causal relationship unique in the pervasive developmental disorder, by carrying out the steps described herein. It will be understood by the skilled artisan, however, that a custom built pervasive developmental disorder model that is used to generate an initial, “first generation” consensus causal relationship network for a pervasive developmental disorder can continually evolve or expand over time, e.g., by the introduction of additional cell lines and/or additional appropriate conditions. Additional data from the evolved cell model for a pervasive developmental disorder, i.e., data from the newly added portion(s) of the cell model, can be collected. The new data collected from an expanded or evolved cell model, i.e., from newly added portion(s) of the cell model, can then be introduced to the data sets previously used to generate the “first generation” consensus causal relationship network in order to generate a more robust “second generation” consensus causal relationship network. New causal relationships unique to the pervasive developmental disorder can then be identified from the “second generation” consensus causal relationship network. In this way, the evolution of the cell model provides an evolution of the consensus causal relationship networks, thereby providing new and/or more reliable insights into the modulators of the pervasive developmental disorder.

[0254] The present invention provides methods that include treating cells with an Environmental Influencer. “Environmental influencers” (Env-influencers) are molecules that influence or modulate the disease environment of a human in a beneficial manner allowing the human's disease environment to shift, reestablish back to or maintain a normal or healthy environment leading to a normal state. Env-influencers include both Multidimensional Intracellular Molecules (MIMs) and Epimetabolic shifters (Epi-shifters) as defined below. MIMs and epishifters are described in further detail in U.S. Ser. No. 12/777,902 (US 2011-0110914), the entire contents of which are expressly incorporated herein by reference.

[0255] The term “Multidimensional Intracellular Molecule (MIM)” is an isolated version or synthetically produced version of an endogenous molecule that is naturally produced by the body and/or is present in at least one cell of a human. A MIM is characterized by one or more, two or more, three or more, or all of the following functions. MIMs are capable of entering a cell, and the entry into the cell includes complete or partial entry into the cell, as long as the biologically active portion of the molecule wholly enters the cell. MIMs are capable of inducing a signal transduction and/or gene expression mechanism within a cell. MIMs are multidimensional in that the molecules have both a therapeutic and a carrier, e.g., drug delivery, effect. MIMs also are multidimensional in that the molecules act one way in a disease state and a different way in a normal state. Preferably, MIMs selectively act in cells of a disease state, and have substantially no effect in (matching) cells of a normal state. Preferably, MIMs selectively renders cells of a disease state closer in phenotype, metabolic state, genotype, mRNA/protein expression level, etc. to (matching) cells of a normal state.

[0256] In one embodiment, a MIM is also an epi-shifter. In another embodiment, a MIM is not an epi-shifter. The skilled artisan will appreciate that a MIM of the invention is also intended to encompass a mixture of two or more endogenous molecules, wherein the mixture is characterized by one or more of the foregoing functions. The endogenous molecules in the mixture are present at a ratio such that the mixture functions as a MIM.

[0257] MIMs can be lipid based or non-lipid based molecules. Examples of MIMs include, but are not limited to, CoQ10, acetyl Co-A, palmityl Co-A, L-carnitine, amino acids such as, for example, tyrosine, phenylalanine, and cysteine. In one embodiment, the MIM is a small molecule. In one embodiment of the invention, the MIM is not CoQ10. MIMs can be routinely identified by one of skill in the art using any of the assays described in detail herein.

[0258] As used herein, an “epimetabolic shifter” (epi-shifter) is a molecule (endogenous or exogenous) that modulates the metabolic shift from a healthy (or normal) state to a disease state and vice versa, thereby maintaining or reestablishing cellular, tissue, organ, system and/or host health in a human. Epi-shifters are capable of effectuating normalization in a tissue microenvironment. For example, an epi-shifter includes any molecule which is capable, when added to or depleted from a cell, of affecting the microenvironment (e.g., the metabolic state) of a cell. The skilled artisan will appreciate that an epi-shifter of the invention is also intended to encompass a mixture of two or more molecules, wherein the mixture is characterized by one or more of the foregoing functions. The molecules in the mixture are present at a ratio such that the mixture functions as an epi-shifter.

[0259] In some embodiments, the epi-shifter is an enzyme, such as an enzyme that either directly participates in catalyzing one or more reactions in the Citric Acid Cycle, or produces a Citric Acid Cycle intermediate, the excess of which drive the Citric Acid Cycle. In one embodiment, the enzyme is a component enzyme or enzyme complex that facilitates the Citric Acid Cycle, such as a synthase or a ligase. Exemplary enzymes include succinyl CoA synthase (Krebs Cycle enzyme) or pyruvate carboxylase (a ligase that catalyzes the reversible carboxylation of pyruvate to form oxaloacetate (OAA), a Krebs Cycle intermediate).

[0260] In some embodiments, the enzymes of the present invention, e.g., the MIMs or epi-shifters described herein, share a common activity with the proteins listed in Tables 2-6. As used herein, the phrase “share a common activity with a protein listed in Tables 2-6” refers to the ability of a protein to exhibit at least a portion of the same or similar activity as said protein. In some embodiments, the proteins of the present invention exhibit 25% or more of the activity of said protein. In some embodiments, the compounds of the present invention exhibit up to and including about 130% of the activity of said protein. In some embodiments, the compounds of the present invention exhibit about 30%, 31%, 32%, 33%, 34%, 35%, 36%, 37%, 38%, 39%, 40%, 41%, 42%, 43%, 44%, 45%, 46%, 47%, 48%, 49%, 50%, 51%, 52%, 53%, 54%, 55%, 56%, 57%, 58%, 59%, 60%, 61%, 62%, 63%, 64%, 65%, 66%, 67%, 68%, 69%, 70%, 71%, 72%, 73%, 74%, 75%, 76%, 77%, 78%, 79%, 80%, 81%, 82%, 83%, 84%, 85%, 86%, 87%, 88%, 89%, 90%, 91%, 92%, 93%, 94%, 95%, 96%, 97%, 98%, 99%, 100%, 101%, 102%, 103%, 104%, 105%, 106%, 107%, 108%, 109%, 110%, 111%, 112%, 113%, 114%, 115%, 116%, 117%, 118%, 119%, 120%, 121%, 122%, 123%, 124%, 125%, 126%, 127%, 128%, 129%, or 130% of the activity of said protein. It is to be understood that each of the values listed in this paragraph may be modified by the term “about.” Additionally, it is to be understood that any range which is defined by any two values listed in this paragraph is meant to be encompassed by the present invention. For example, in some embodiments, the proteins of the present invention exhibit between about 50% and about 100% of the activity of said protein.

[0261] B. Data Collection

[0262] In general, two types of data may be collected from any custom built model system for a pervasive developmental disorder. One type of data (e.g., the first set of data, the third set of data) usually relates to the level of certain macromolecules, such as DNA, RNA, protein, lipid, etc. An exemplary data set in this category is proteomic data (e.g., qualitative and quantitative data concerning the expression of all or substantially all measurable proteins from a sample). Another type of data that may, optionally, be collected is functional data (e.g., the optional second set of data, the fourth set of data) that reflects the phenotypic changes resulting from the changes in the first type of data.

[0263] With respect to the first type of data, in some example embodiments, quantitative polymerase chain reaction (qPCR) and proteomics are performed to profile changes in cellular mRNA and protein expression by quantitative polymerase chain reaction (qPCR) and proteomics. Total RNA can be isolated using a commercial RNA isolation kit. Following cDNA synthesis, specific commercially available qPCR arrays (e.g., those from SA Biosciences) for disease area or cellular processes such as angiogenesis, apoptosis, and diabetes, may be employed to profile a predetermined set of genes by following a manufacturer's instructions. For example, the Biorad cfx-384 amplification system can be used for all transcriptional profiling experiments. Following data collection (Ct), the final fold change over control can be determined using the δCt method as outlined in manufacturer's protocol. Proteomic sample analysis can be performed as described in subsequent sections.

[0264] The subject method may employ large-scale high-throughput quantitative proteomic analysis of hundreds of samples of similar character, and provides the data necessary for identifying the cellular output differentials.

[0265] There are numerous art-recognized technologies suitable for this purpose. An exemplary technique, iTRAQ analysis in combination with mass spectrometry, is briefly described below.

[0266] The quantitative proteomics approach is based on stable isotope labeling with the 8-plex iTRAQ reagent and 2D-LC MALDI MS/MS for peptide identification and quantification. Quantification with this technique is relative: peptides and proteins are assigned abundance ratios relative to a reference sample. Common reference samples in multiple iTRAQ experiments facilitate the comparison of samples across multiple iTRAQ experiments.

[0267] For example, to implement this analysis scheme, six primary samples and two control pool samples can be combined into one 8-plex iTRAQ mix according to the manufacturer's suggestions. This mixture of eight samples then can be fractionated by two-dimensional liquid chromatography; strong cation exchange (SCX) in the first dimension, and reversed-phase HPLC in the second dimension, then can be subjected to mass spectrometric analysis.

[0268] A brief overview of exemplary laboratory procedures that can be employed is provided herein.

[0269] Protein extraction: Cells can be lysed with 8 M urea lysis buffer with protease inhibitors (Thermo Scientific Halt Protease inhibitor EDTA-free) and incubate on ice for 30 minutes with vertex for 5 seconds every 10 minutes. Lysis can be completed by ultrasonication in 5 seconds pulse. Cell lysates can be centrifuged at 14000×g for 15 minutes (4° C.) to remove cellular debris. Bradford assay can be performed to determine the protein concentration. 100 ug protein from each samples can be reduced (10 mM Dithiothreitol (DTT), 55° C., 1 h), alkylated (25 mM iodoacetamide, room temperature, 30 minutes) and digested with Trypsin (1:25 w/w, 200 mM triethylammonium bicarbonate (TEAB), 37° C., 16 h).

[0270] Secretome Sample Preparation:

[0271] 1) In one embodiment, the cells can be cultured in serum free medium: Conditioned media can be concentrated by freeze dryer, reduced (10 mM Dithiothreitol (DTT), 55° C., 1 h), alkylated (25 mM iodoacetamide, at room temperature, incubate for 30 minutes), and then desalted by actone precipitation. Equal amount of proteins from the concentrated conditioned media can be digested with Trypsin (1:25 w/w, 200 mM triethylammonium bicarbonate (TEAB), 37° C., 16 h).

[0272] In one embodiment, the cells can be cultured in serum containing medium: The volume of the medium can be reduced using 3k MWCO Vivaspin columns (GE Healthcare Life Sciences), then can be reconstituted with 1×PBS (Invitrogen). Serum albumin can be depleted from all samples using AlbuVoid column (Biotech Support Group, LLC) following the manufacturer's instructions with the modifications of buffer-exchange to optimize for condition medium application.

[0273] iTRAQ 8 Plex Labeling:

[0274] Aliquot from each tryptic digests in each experimental set can be pooled together to create the pooled control sample. Equal aliquots from each sample and the pooled control sample can be labeled by iTRAQ 8 Plex reagents according to the manufacturer's protocols (AB Sciex). The reactions can be combined, vacuumed to dryness, re-suspended by adding 0.1% formic acid, and analyzed by LC-MS/MS.

[0275] 2D-NanoLC-MS/MS:

[0276] All labeled peptides mixtures can be separated by online 2D-nanoLC and analysed by electrospray tandem mass spectrometry. The experiments can be carried out on an Eksigent 2D NanoLC Ultra system connected to an LTQ Orbitrap Velos mass spectrometer equipped with a nanoelectrospray ion source (Thermo Electron, Bremen, Germany).

[0277] The peptides mixtures can be injected into a 5 cm SCX column (300 μm ID, 5 μm, PolySULFOETHYL Aspartamide column from PolyLC, Columbia, Md.) with a flow of 4 μL/min and eluted in 10 ion exchange elution segments into a C18 trap column (2.5 cm, 100 μm ID, 5 μm, 300 Å ProteoPep II from New Objective, Woburn, Mass.) and washed for 5 min with H2O/0.1% FA. The separation then can be further carried out at 300 nL/min using a gradient of 2-45% B (H2O/0.1% FA (solvent A) and ACN/0.1% FA (solvent B)) for 120 minutes on a 15 cm fused silica column (75 μm ID, 5 μm, 300 Å ProteoPep II from New Objective, Woburn, Mass.).

[0278] Full scan MS spectra (m/z 300-2000) can be acquired in the Orbitrap with resolution of 30,000. The most intense ions (up to 10) can be sequentially isolated for fragmentation using High energy C-trap Dissociation (HCD) and dynamically exclude for 30 seconds. HCD can be conducted with an isolation width of 1.2 Da. The resulting fragment ions can be scanned in the orbitrap with resolution of 7500. The LTQ Orbitrap Velos can be controlled by Xcalibur 2.1 with foundation 1.0.1.

[0279] Peptides/Proteins Identification and Quantification:

[0280] Peptides and proteins can be identified by automated database searching using Proteome Discoverer software (Thermo Electron) with Mascot search engine against SwissProt database. Search parameters can include 10 ppm for MS tolerance, 0.02 Da for MS2 tolerance, and full trypsin digestion allowing for up to 2 missed cleavages. Carbamidomethylation (C) can be set as the fixed modification. Oxidation (M), TMT6, and deamidation (NQ) can be set as dynamic modifications. Peptides and protein identifications can be filtered with Mascot Significant Threshold (p<0.05). The filters can be allowed a 99% confidence level of protein identification (1% FDA).

[0281] The Proteome Discoverer software can apply correction factors on the reporter ions, and can reject all quantitation values if not all quantitation channels are present. Relative protein quantitation can be achieved by normalization at the mean intensity.

[0282] With respect to the second type of data, in some exemplary embodiments, bioenergetics profiling of pervasive developmental disorder and normal models may employ the Seahorse™ XF24 analyzer to enable the understanding of glycolysis and oxidative phosphorylation components.

[0283] Specifically, cells can be plated on Seahorse culture plates at optimal densities. These cells can be plated in 100 μl of media or treatment and left in a 37° C. incubator with 5% CO₂. Two hours later, when the cells are adhered to the 24 well plate, an additional 150 μl of either media or treatment solution can be added and the plates can be left in the culture incubator overnight. This two step seeding procedure allows for even distribution of cells in the culture plate. Seahorse cartridges that contain the oxygen and pH sensor can be hydrated overnight in the calibrating fluid in a non-CO₂ incubator at 37° C. Three mitochondrial drugs are typically loaded onto three ports in the cartridge. Oligomycin, a complex III inhibitor, FCCP, an uncoupler and Rotenone, a complex I inhibitor can be loaded into ports A, B and C respectively of the cartridge. All stock drugs can be prepared at a 10× concentration in an unbuffered DMEM media. The cartridges can be first incubated with the mitochondrial compounds in a non-CO₂ incubator for about 15 minutes prior to the assay. Seahorse culture plates can be washed in DMEM based unbuffered media that contains glucose at a concentration found in the normal growth media. The cells can be layered with 630 ul of the unbuffered media and can be equilibriated in a non-CO₂ incubator before placing in the Seahorse instrument with a precalibrated cartridge. The instrument can be run for three-four loops with a mix, wait and measure cycle for get a baseline, before injection of drugs through the port is initiated. There can be two loops before the next drug is introduced.

[0284] OCR (Oxygen consumption rate) and ECAR (Extracullular Acidification Rate) can be recorded by the electrodes in a 7 μl chamber and can be created with the cartridge pushing against the seahorse culture plate.

[0285] C. Data Integration and in silico Model Generation

[0286] Once relevant data sets have been obtained, integration of data sets and generation of computer-implemented statistical models may be performed using an AI-based informatics system or platform (e.g, the REFS™ platform). For example, an exemplary AI-based system may produce simulation-based networks of protein associations as key drivers of metabolic end points (ECAR/OCR). See FIG. 4. Some background details regarding the REFS™ system may be found in Xing et al., “Causal Modeling Using Network Ensemble Simulations of Genetic and Gene Expression Data Predicts Genes Involved in Rheumatoid Arthritis,” PLoS Computational Biology, vol. 7, issue. 3, 1-19 (March 2011) (e100105) and U.S. Pat. No. 7,512,497 to Periwal, the entire contents of each of which is expressly incorporated herein by reference in its entirety. In essence, as described earlier, the REFS™ system is an AI-based system that employs mathematical algorithms to establish causal relationships among the input variables (e.g., protein expression levels, mRNA expression levels, and the corresponding functional data, such as the OCR/ECAR values measured on Seahorse culture plates). This process is based only on the input data alone, without taking into consideration prior existing knowledge about any potential, established, and/or verified biological relationships.

[0287] In particular, a significant advantage of the platform of the invention is that the AI-based system is based on the data sets obtained from the cell model, without resorting to or taking into consideration any existing knowledge in the art concerning the biological process. Further, preferably, no data points are statistically or artificially cut-off and, instead, all obtained data is fed into the AI-system for determining protein associations. Accordingly, the resulting statistical models generated from the platform are unbiased, since they do not take into consideration any known biological relationships.

[0288] Specifically, data from the proteomics and ECAR/OCR can be input into the AI-based information system, which builds statistical models based on data associations, as described above. Simulation-based networks of protein associations are then derived for each disease versus normal scenario, including treatments and conditions using the following methods.

[0289] A detailed description of an exemplary process for building the generated (e.g., optimized or evolved) networks appears below with respect to FIG. 5. As described above, data from the proteomics and, optionally, functional cell data is input into the AI-based system (step 210). The input data, which may be raw data or minimally processed data, is pre-processed, which may include normalization (e.g., using a quantile function or internal standards) (step 212). The pre-processing may also include imputing missing data values (e.g., by using the K-nearest neighbor (K-NN) algorithm) (step 212).

[0290] The pre-processed data is used to construct a network fragment library (step 214). The network fragments define quantitative, continuous relationships among all possible small sets (e.g., 2-3 member sets or 2-4 member sets) of measured variables (input data). The relationships between the variables in a fragment may be linear, logistic, multinomial, dominant or recessive homozygous, etc. The relationship in each fragment is assigned a Bayesian probabilistic score that reflect how likely the candidate relationship is given the input data, and also penalizes the relationship for its mathematical complexity. By scoring all of the possible pairwise and three-way relationships (and in some embodiments also four-way relationships) inferred from the input data, the most likely fragments in the library can be identified (the likely fragments). Quantitative parameters of the relationship are also computed based on the input data and stored for each fragment. Various model types may be used in fragment enumeration including but not limited to linear regression, logistic regression, (Analysis of Variance) ANOVA models, (Analysis of Covariance) ANCOVA models, non-linear/polynomial regression models and even non-parametric regression. The prior assumptions on model parameters may assume Gull distributions or Bayesian Information Criterion (BIC) penalties related to the number of parameters used in the model. In a network inference process, each network in an ensemble of initial trial networks is constructed from a subset of fragments in the fragment library. Each initial trial network in the ensemble of initial trial networks is constructed with a different subset of the fragments from the fragment library (step 216).

[0291] An overview of the mathematical representations underlying the Bayesian networks and network fragments, which is based on Xing et al., “Causal Modeling Using Network Ensemble Simulations of Genetic and Gene Expression Data Predicts Genes Involved in Rheumatoid Arthritis,” PLoS Computational Biology, vol. 7, issue. 3, 1-19 (March 2011) (e100105), is presented below.

[0292] A multivariate system with random variables X=X₁, . . . , Xₙ may be characterized by a multivariate probability distribution function P(X₁, . . . , Xₙ; Θ), that includes a large number of parameters Θ. The multivariate probability distribution function may be factorized and represented by a product of local conditional probability distributions:

$$P ( {X}_{1} , … , {X}_{n} ; Θ ) = {\prod }_{i = 1}^{n} {P}_{i} ( {X}_{i} \vert {Y}_{j 1} , … , {Y}_{{jK}_{i}} ; Θ ) ,$$

[0293] in which each variable Xᵢ is independent from its non-descendent variables given its Kᵢ parent variables, which are Yⱼ₁, . . . Y_{jK}_{ᵢ}. After factorization, each local probability distribution has its own parameters Θᵢ.

[0294] The multivariate probability distribution function may be factorized in different ways with each particular factorization and corresponding parameters being a distinct probabilistic model. Each particular factorization (model) can be represented by a Directed Acrylic Graph (DAC) having a vertex for each variable Xᵢ and directed edges between vertices representing dependences between variables in the local conditional distributions Pᵢ(Xᵢ|Yⱼ₁, . . . Y_{jK}_{ᵢ}). Subgraphs of a DAG, each including a vertex and associated directed edges are network fragments.

[0295] A model is evolved or optimized by determining the most likely factorization and the most likely parameters given the input data. This may be described as “learning a Bayesian network,” or, in other words, given a training set of input data, finding a network that best matches the input data. This is accomplished by using a scoring function that evaluates each network with respect to the input data.

[0296] A Bayesian framework is used to determine the likelihood of a factorization given the input data. Bayes Law states that the posterior probability, P(D|M), of a model M, given data D is proportional to the product of the product of the posterior probability of the data given the model assumptions, P(D|M), multiplied by the prior probability of the model, P(M), assuming that the probability of the data, P(D), is constant across models. This is expressed in the following equation:

$$P ( M \vert D ) = \frac{P ( D \vert M ) * P ( M )}{P ( D )} .$$

[0297] The posterior probability of the data assuming the model is the integral of the data likelihood over the prior distribution of parameters:

P(D|M)=∫P(D|M(Θ))P(Θ|M)dΘ.

Assuming all models are equally likely (i.e., that P(M) is a constant), the posterior probability of model M given the data D may be factored into the product of integrals over parameters for each local network fragment Mᵢ as follows:

$$P ( M \vert D ) = {\prod }_{i = 1}^{n} {P}_{i} ( {X}_{i} \vert {Y}_{j 1} , … , {Y}_{{jK}_{i}} ; Θ ) .$$

Note that in the equation above, a leading constant term has been omitted. In some embodiments, a Bayesian Information Criterion (BIC), which takes a negative logarithm of the posterior probability of the model P(D|M) may be used to “Score” each model as follows:

$${S}_{tot} ( M ) = - log P ( M \vert D ) = {\sum }_{i = 1}^{n} S ( {M}_{i} ) ,$$

where the total score Sₜₒₜ, for a model M is a sum of the local scores Sᵢ for each local network fragment. The BIC further gives an expression for determining a score each individual network fragment:

$$S ( {M}_{i} ) \approx {S}_{BIC} ( {M}_{i} ) = {S}_{MLE} ( {M}_{i} ) + \frac{κ ( {M}_{i} )}{2} log N$$

where κ(Mᵢ) is the number of fitting parameter in model Mᵢ and N is the number of samples (data points). S_{MLE}(Mᵢ) is the negative logarithm of the likelihood function for a network fragment, which may be calculated from the functional relationships used for each network fragment. For a BIC score, the lower the score, the more likely a model fits the input data.

[0298] The ensemble of trial networks is globally optimized, which may be described as optimizing or evolving the networks (step 218). For example, the trial networks may be evolved and optimized according to a Metropolis Monte Carlo Sampling alogorithm. Simulated annealing may be used to optimize or evolve each trial network in the ensemble through local transformations. In an example simulated annealing processes, each trial network is changed by adding a network fragment from the library, by deleted a network fragment from the trial network, by substituting a network fragment or by otherwise changing network topology, and then a new score for the network is calculated. Generally speaking, if the score improves, the change is kept and if the score worsens the change is rejected. A “temperature” parameter allows some local changes which worsen the score to be kept, which aids the optimization process in avoiding some local minima. The “temperature” parameter is decreased over time to allow the optimization/evolution process to converge.

[0299] All or part of the network inference process may be conducted in parallel for the trial different networks. Each network may be optimized in parallel on a separate processor and/or on a separate computing device. In some embodiments, the optimization process may be conducted on a supercomputer incorporating hundreds to thousands of processors which operate in parallel. Information may be shared among the optimization processes conducted on parallel processors.

[0300] The optimization process may include a network filter that drops any networks from the ensemble that fail to meet a threshold standard for overall score. The dropped network may be replaced by a new initial network. Further any networks that are not “scale free” may be dropped from the ensemble. After the ensemble of networks has been optimized or evolved, the result may be termed an ensemble of generated cell model networks, which may be collectively referred to as the generated consensus network.

[0301] D. Simulation to Extract Quantitative Relationship Information and for Prediction

[0302] Simulation may be used to extract quantitative parameter information regarding each relationship in the generated cell model networks (step 220). For example, the simulation for quantitative information extraction may involve perturbing (increasing or decreasing) each node in the network by 10 fold and calculating the posterior distributions for the other nodes (e.g., proteins) in the models. The endpoints are compared by t-test with the assumption of 100 samples per group and the 0.01 significance cut-off. The t-test statistic is the median of 100 t-tests. Through use of this simulation technique, an AUC (area under the curve) representing the strength of prediction and fold change representing the in silico magnitude of a node driving an end point are generated for each relationship in the ensemble of networks.

[0303] A relationship quantification module of a local computer system may be employed to direct the AI-based system to perform the perturbations and to extract the AUC information and fold information. The extracted quantitative information may include fold change and AUC for each edge connecting a parent note to a child node. In some embodiments, a custom-built R program may be used to extract the quantitative information.

[0304] In some embodiments, the ensemble of generated cell model networks can be used through simulation to predict responses to changes in conditions, which may be later verified though wet-lab cell-based, or animal-based, experiments.

[0305] The output of the AI-based system may be quantitative relationship parameters and/or other simulation predictions (222).

[0306] E. Generation of Differential (Delta) Networks

[0307] A differential network creation module may be used to generate differential (delta) networks between generated cell model networks and generated comparison cell model networks (e.g., a differential (delta) network between a network generated from cells associated with a pervasive developmental disorder, and a network generated from control cells). As described above, in some embodiments, the differential network compares all of the quantitative parameters of the relationships in the generated cell model networks and the generated comparison cell model network. The quantitative parameters for each relationship in the differential network are based on the comparison. In some embodiments, a differential may be performed between various differential networks, which may be termed a delta-delta network. The differential network creation module may be a program or script written in PERL.

[0308] F. Visualization of Networks

[0309] The relationship values for the ensemble of networks and for the differential networks may be visualized using a network visualization program (e.g., Cytoscape open source platform for complex network analysis and visualization from the Cytoscape consortium). In the visual depictions of the networks, the thickness of each edge (e.g., each line connecting the proteins) represents the strength of fold change. The edges are also directional indicating causality, and each edge has an associated prediction confidence level.

[0310] G. Exemplary Computer System

[0311] FIG. 6 schematically depicts an exemplary computer system/environment that may be employed in some embodiments for communicating with the AI-based informatics system, for generating differential networks, for visualizing networks, for saving and storing data, and/or for interacting with a user. As explained above, calculations for an AI-based informatics system may be performed on a separate supercomputer with hundreds or thousands of parallel processors that interacts, directly or indirectly, with the exemplary computer system. The environment includes a computing device 100 with associated peripheral devices. Computing device 100 is programmable to implement executable code 150 for performing various methods, or portions of methods, taught herein. Computing device 100 includes a storage device 116, such as a hard-drive, CD-ROM, or other non-transitory computer readable media. Storage device 116 may store an operating system 118 and other related software. Computing device 100 may further include memory 106. Memory 106 may comprise a computer system memory or random access memory, such as DRAM, SRAM, EDO RAM, etc. Memory 106 may comprise other types of memory as well, or combinations thereof. Computing device 100 may store, in storage device 116 and/or memory 106, instructions for implementing and processing each portion of the executable code 150.

[0312] The executable code 150 may include code for communicating with the AI-based informatics system 190, for generating differential networks (e.g., a differential network creation module), for extracting quantitative relationship information from the AI-based informatics system (e.g., a relationship quantification module) and for visualizing networks (e.g., Cytoscape).

[0313] In some embodiments, the computing device 100 may communicate directly or indirectly with the AI-based informatics system 190 (e.g., a system for executing REFS). For example, the computing device 100 may communicate with the AI-based informatics system 190 by transferring data files (e.g., data frames) to the AI-based informatics system 190 through a network. Further, the computing device 100 may have executable code 150 that provides an interface and instructions to the AI-based informatics system 190.

[0314] In some embodiments, the computing device 100 may communicate directly or indirectly with one or more experimental systems 180 that provide data for the input data set. Experimental systems 180 for generating data may include systems for mass spectrometry based proteomics, microarray gene expression, qPCR gene expression, mass spectrometry based metabolomics, and mass spectrometry based lipidomics, SNP microarrays, a panel of functional assays, and other in-vitro biology platforms and technologies.

[0315] Computing device 100 also includes processor 102, and may include one or more additional processor(s) 102′, for executing software stored in the memory 106 and other programs for controlling system hardware, peripheral devices and/or peripheral hardware. Processor 102 and processor(s) 102′ each can be a single core processor or multiple core (104 and 104′) processor. Virtualization may be employed in computing device 100 so that infrastructure and resources in the computing device can be shared dynamically. Virtualized processors may also be used with executable code 150 and other software in storage device 116. A virtual machine 114 may be provided to handle a process running on multiple processors so that the process appears to be using only one computing resource rather than multiple. Multiple virtual machines can also be used with one processor.

[0316] A user may interact with computing device 100 through a visual display device 122, such as a computer monitor, which may display a user interface 124 or any other interface. The user interface 124 of the display device 122 may be used to display raw data, visual representations of networks, etc. The visual display device 122 may also display other aspects or elements of exemplary embodiments (e.g., an icon for storage device 116). Computing device 100 may include other I/O devices such a keyboard or a multi-point touch interface (e.g., a touchscreen) 108 and a pointing device 110, (e.g., a mouse, trackball and/or trackpad) for receiving input from a user. The keyboard 108 and the pointing device 110 may be connected to the visual display device 122 and/or to the computing device 100 via a wired and/or a wireless connection.

[0317] Computing device 100 may include a network interface 112 to interface with a network device 126 via a Local Area Network (LAN), Wide Area Network (WAN) or the Internet through a variety of connections including, but not limited to, standard telephone lines, LAN or WAN links (e.g., 802.11, T1, T3, 56kb, X.25), broadband connections (e.g., ISDN, Frame Relay, ATM), wireless connections, controller area network (CAN), or some combination of any or all of the above. The network interface 112 may comprise a built-in network adapter, network interface card, PCMCIA network card, card bus network adapter, wireless network adapter, USB network adapter, modem or any other device suitable for enabling computing device 100 to interface with any type of network capable of communication and performing the operations described herein.

[0318] Moreover, computing device 100 may be any computer system such as a workstation, desktop computer, server, laptop, handheld computer or other form of computing or telecommunications device that is capable of communication and that has sufficient processor power and memory capacity to perform the operations described herein.

[0319] Computing device 100 can be running any operating system 118 such as any of the versions of the MICROSOFT WINDOWS operating systems, the different releases of the Unix and Linux operating systems, any version of the MACOS for Macintosh computers, any embedded operating system, any real-time operating system, any open source operating system, any proprietary operating system, any operating systems for mobile computing devices, or any other operating system capable of running on the computing device and performing the operations described herein. The operating system may be running in native mode or emulated mode.

[0320] H. Exemplary Cell Model and Protein Analysis Used to Identify Proteins as Therapeutic Targets and/or Diagnostic Markers for Pervasive Developmental Disorder

[0321] Virtually all disease conditions involve complicated interactions among different cell types and/or organ systems. Perturbation of critical functions in one cell type or organ may lead to secondary effects on other interacting cells types and organs, and such downstream changes may in turn feedback to the initial changes and cause further complications.

[0322] Therefore, it may be beneficial to dissect a given disease condition to its components, such as interaction between pairs of cell types or organs, and systemically probe the interactions between these components in order to gain a more complete, global view of the disease condition.

[0323] To this end, Applicants have identified multiple sets of cell pairs for use in the subject discovery platform in a number of disease conditions relating to pervasive developmental disorder, such as autism and Alzheimer's disease, and have conducted experiments using the discovery platform to decipher the critical determinative differentials that may be important for the particular disease status. Cell lines indicated below have been processed and analyzed as described herein.

| Cell line 1 | Cell line 2 | Disease model |
|---|---|---|
| Cells from Autistic | Cell line from control, | Autism |
| Individual | healthy individual (e.g., | |
| | sibling or parent who is not | |
| | afflicted with Autism) | |
| Cell line from Individual | Cell line from control, | Alzheimer's |
| afflicted with Alzheimer's | healthy individual (e.g., | disease |
| disease | sibling or parent who is not | |
| | afflicted with Alzheimer's | |
| | disease) | |

[0324] Various stress conditions/stressors may be employed in each of the listed disease conditions. These stressors/conditions may constitute the external stimulus for the cell systems. For example, the cells may be treated with Coenzyme Q10.

### 1. Proteomic Sample Analysis

[0325] In certain embodiments, the subject method employs large-scale high-throughput quantitative proteomic analysis of hundreds of samples of similar character, and provide the data necessary for identifying the cellular output differentials.

[0326] There are numerous art-recognized technologies suitable for this purpose. An exemplary technique, iTRAQ analysis in combination with mass spectrometry, is briefly described below.

[0327] To provide reference samples for relative quantification with the iTRAQ technique, multiple QC pools are created. Two separate QC pools, consisting of aliquots of each sample, were generated from the Cell #1 and Cell #2 samples—these samples are denoted as QCS1 and QCS2, and QCP1 and QCP2 for supernatants and pellets, respectively. In order to allow for protein concentration comparison across the two cell lines, cell pellet aliquots from the QC pools described above are combined in equal volumes to generate reference samples (QCP).

[0328] The quantitative proteomics approach is based on stable isotope labeling with the 8-plex iTRAQ reagent and 2D-LC MALDI MS/MS for peptide identification and quantification. Quantification with this technique is relative: peptides and proteins are assigned abundance ratios relative to a reference sample. Common reference samples in multiple iTRAQ experiments facilitate the comparison of samples across multiple iTRAQ experiments.

[0329] To implement this analysis scheme, six primary samples and two control pool samples are combined into one 8-plex iTRAQ mix, with the control pool samples labeled with 113 and 117 reagents according to the manufacturer's suggestions. This mixture of eight samples is then fractionated by two-dimensional liquid chromatography; strong cation exchange (SCX) in the first dimension, and reversed-phase HPLC in the second dimension. The HPLC eluent is directly fractionated onto MALDI plates, and the plates are analyzed on an MDS SCIEX/AB 4800 MALDI TOF/TOF mass spectrometer.

[0330] In the absence of additional information, it is assumed that the most important changes in protein expression are those within the same cell types under different treatment conditions. For this reason, primary samples from Cell#1 and Cell#2 are analyzed in separate iTRAQ mixes. To facilitate comparison of protein expression in Cell#1 vs. Cell#2 samples, universal QCP samples are analyzed in the available “iTRAQ slots” not occupied by primary or cell line specific QC samples (QC1 and QC2).

[0331] A brief overview of the laboratory procedures employed is provided herein.

[0332] a. Protein Extraction From Cell Supernatant Samples

[0333] For cell supernatant samples (CSN), proteins from the culture medium are present in a large excess over proteins secreted by the cultured cells. In an attempt to reduce this background, upfront abundant protein depletion was implemented. As specific affinity columns are not available for bovine or horse serum proteins, an anti-human IgY14 column was used. While the antibodies are directed against human proteins, the broad specificity provided by the polyclonal nature of the antibodies was anticipated to accomplish depletion of both bovine and equine proteins present in the cell culture media that was used.

[0334] A 200-μl aliquot of the CSN QC material is loaded on a 10-mL IgY14 depletion column before the start of the study to determine the total protein concentration (Bicinchoninic acid (BCA) assay) in the flow-through material. The loading volume is then selected to achieve a depleted fraction containing approximately 40 μg total protein.

[0335] b. Protein Extraction From Cell Pellets

[0336] An aliquot of Cell #1 and Cell #2 is lysed in the “standard” lysis buffer used for the analysis of tissue samples at BGM, and total protein content is determined by the BCA assay. Having established the protein content of these representative cell lystates, all cell pellet samples (including QC samples described in Section 1.1) were processed to cell lysates. Lysate amounts of approximately 40 □g of total protein were carried forward in the processing workflow.

[0337] c. Sample Preparation for Mass Spectrometry

[0338] Sample preparation follows standard operating procedures and constitute of the following:
[0339] Reduction and alkylation of proteins
[0340] Protein clean-up on reversed-phase column (cell pellets only)
[0341] Digestion with trypsin
[0342] iTRAQ labeling
[0343] Strong cation exchange chromatography—collection of six fractions (Agilent 1200 system)
[0344] HPLC fractionation and spotting to MALDI plates (Dionex Ultimate3000/Probot system)

[0345] d. MALDI MS and MS/MS

[0346] HPLC-MS generally employs online ESI MS/MS strategies. BG Medicine uses an off-line LC-MALDI MS/MS platform that results in better concordance of observed protein sets across the primary samples without the need of injecting the same sample multiple times. Following first pass data collection across all iTRAQ mixes, since the peptide fractions are retained on the MALDI target plates, the samples can be analyzed a second time using a targeted MS/MS acquisition pattern derived from knowledge gained during the first acquisition. In this manner, maximum observation frequency for all of the identified proteins is accomplished (ideally, every protein should be measured in every iTRAQ mix).

[0347] e. Data Processing

[0348] The data processing process within the BGM Proteomics workflow can be separated into those procedures such as preliminary peptide identification and quantification that are completed for each iTRAQ mix individually (Section 1.5.1) and those processes (Section 1.5.2) such as final assignment of peptides to proteins and final quantification of proteins, which are not completed until data acquisition is completed for the project.

[0349] The main data processing steps within the BGM Proteomics workflow are:
[0350] Peptide identification using the Mascot (Matrix Sciences) database search engine
[0351] Automated in house validation of Mascot IDs
[0352] Quantification of peptides and preliminary quantification of proteins
[0353] Expert curation of final dataset
[0354] Final assignment of peptides from each mix into a common set of proteins using the automated PVT tool
[0355] Outlier elimination and final quantification of proteins
   [0356] i. Data Processing of Individual iTRAQ Mixes

[0357] As each iTRAQ mix is processed through the workflow the MS/MS spectra are analyzed using proprietary BGM software tools for peptide and protein identifications, as well as initial assessment of quantification information. Based on the results of this preliminary analysis, the quality of the workflow for each primary sample in the mix is judged against a set of BGM performance metrics. If a given sample (or mix) does not pass the specified minimal performance metrics, and additional material is available, that sample is repeated in its entirety and it is data from this second implementation of the workflow that is incorporated in the final dataset.

[0358] ii. Peptide Identification

[0359] MS/MS spectra was searched against the Uniprot protein sequence database containing human, bovine, and horse sequences augmented by common contaminant sequences such as porcine trypsin. The details of the Mascot search parameters, including the complete list of modifications, are given in Table 1.

TABLE 1
Mascot Search Parameters

| Precursor mass tolerance | 100 ppm |
|---|---|
| Fragment mass tolerance | 0.4 Da |
| Variable modifications | N-term iTRAQ8 |
| | Lysine iTRAQ8 |
| | Cys carbamidomethyl |
| | Pyro-Glu (N-term) |
| | Pyro-Carbamidomethyl Cys |
| | (N-term) |
| | Deamidation (N only) |
| | Oxidation (M) |
| Enzyme specificity | Fully Tryptic |
| Number of missed tryptic sites allowed | 2 |
| Peptide rank considered | 1 |

[0360] After the Mascot search is complete, an auto-validation procedure is used to promote (i.e., validate) specific Mascot peptide matches. Differentiation between valid and invalid matches is based on the attained Mascot score relative to the expected Mascot score and the difference between the Rank 1 peptides and Rank 2 peptide Mascot scores. The criteria required for validation are somewhat relaxed if the peptide is one of several matched to a single protein in the iTRAQ mix or if the peptide is present in a catalogue of previously validated peptides.

[0361] iii. Peptide and Protein Quantification

[0362] The set of validated peptides for each mix is utilized to calculate preliminary protein quantification metrics for each mix. Peptide ratios are calculated by dividing the peak area from the iTRAQ label (i.e., m/z 114, 115, 116, 118, 119, or 121) for each validated peptide by the best representation of the peak area of the reference pool (QC1 or QC2). This peak area is the average of the 113 and 117 peaks provided both samples pass QC acceptance criteria. Preliminary protein ratios are determined by calculating the median ratio of all “useful” validated peptides matching to that protein. “Useful” peptides are fully iTRAQ labeled (all N-terminal are labeled with either Lysine or PyroGlu) and fully Cysteine labeled (i.e., all Cys residues are alkylated with Carbamidomethyl or N-terminal Pyro-cmc).

[0363] f. Post-Acquisition Processing

[0364] Once all passes of MS/MS data acquisition are complete for every mix in the project, the data is collated using the three steps discussed below which are aimed at enabling the results from each primary sample to be simply and meaningfully compared to that of another.

[0365] i. Global Assignment of Peptide Sequences to Proteins

[0366] Final assignment of peptide sequences to protein accession numbers is carried out through the proprietary Protein Validation Tool (PVT). The PVT procedure determines the best, minimum non-redundant protein set to describe the entire collection of peptides identified in the project. This is an automated procedure that has been optimized to handle data from a homogeneous taxonomy.

[0367] Protein assignments for the supernatant experiments were manually curated in order to deal with the complexities of mixed taxonomies in the database. Since the automated paradigm is not valid for cell cultures grown in bovine and horse serum supplemented media, extensive manual curation is necessary to minimize the ambiguity of the source of any given protein.

[0368] ii. Normalization of Peptide Ratios

[0369] The peptide ratios for each sample are normalized based on the method of Vandesompele et al. Genome Biology, 2002, 3(7), research 0034.1-11. This procedure is applied to the cell pellet measurements only. For the supernatant samples, quantitative data are not normalized considering the largest contribution to peptide identifications coming from the media.

[0370] iii. Final Calculation of Protein Ratios

[0371] A standard statistical outlier elimination procedure is used to remove outliers from around each protein median ratio, beyond the 1.96a level in the log-transformed data set. Following this elimination process, the final set of protein ratios are (re-)calculated.

### IV. PERVASIVE DEVELOPMENTAL DISORDERS

[0372] Pervasive developmental disorders are neurodevelopmental disorders that include autistic disorder, Asperger's syndrome, pervasive developmental disorder-not otherwise specified (PDD-NOS), Rett's syndrome, and childhood disintegrative disorder. The disorders and diagnostic criteria are provided in the Diagnostic and Statistical Manual of Mental Disorders, 4^{th} edition (DSM-IV); International Classification of Diseases, 10^{th} edition; Levy et al.), the pertinent contents of which are expressly incorporated herein by reference. Autism spectrum disorders include autistic disorder (also known autism), Asperger's syndrome, and PDD-NOS. Autism spectrum disorders are observed three to four times more frequently in males than in females. In the U.S.A. and Europe, prevalence rates of autism spectrum disorders have increased dramatically since the 1960s. Prevalence rates are estimated at about 1 in 150.

[0373] Autism spectrum disorders are characterized by qualitative impairments in social functioning and communication, often accompanied by repetitive and stereotyped patterns of behavior and interests. Autism or autistic disorder involves a severe and pervasive impairment in reciprocal socialization. Asperger's syndrome differs from other autism spectrum disorders by its relative preservation of linguistic and cognitive development. Although not required for diagnosis, physical clumsiness and atypical use of language are frequently reported in Asperger's syndrome. Pervasive developmental disorder-not otherwise specified (PDD-NOS, also known as “atypical personality development,” “atypical PDD,” or “atypical autism”) is included in DSM-IV to encompass cases where there is marked impairment of social interaction, communication, and/or stereotyped behavior patterns or interest, but full features of another pervasive developmental disorder are not met. Individuals diagnosed with PDD-NOS may have difficulties socializing, exhibit repetitive behaviors, or be oversensitive to certain stimuli. In their interaction with others they may struggle to maintain eye contact, appear unemotional, or appear to be unable to speak. They may also have difficulty transitioning from one activity to another.

[0374] Individuals with autism spectrum disorders also exhibit obsessive-compulsive behaviors that partially overlap with symptoms associated with obsessive compulsive disorder. It is contemplated that the methods provided by this invention can be used to treat obsessive compulsive symptoms in individuals with pervasive developmental disorders, as well as other types of disorders such as obsessive compulsive disorder that have similar symptoms or causes.

[0375] Autism spectrum disorders are highly heritable; estimates of heritability from family and twin studies suggest that approximately 90% of the variance is attributable to genetic factors. Parents and siblings of those affected often show subsyndromal manifestations of autism (“the broad autism phenotype”), which include delayed language, difficulties with social aspects of language, delayed social development, absence of close friendships, and a perfectionistic or rigid personality style. However, neither the genetic aspects nor the complex etiology of the disorders are not understood.

[0376] Rett's syndrome is a neurodevelopmental disorder observed primarily in girls and characterized by small hands and feet, repetitive hand movements, and a deceleration of the rate of head growth. Girls with Rett's syndrome are prone to gastrointestinal disorders, up to 80% have seizures, they typically have no verbal skills, and about 50% are not ambulatory. Scoliosis, growth failure, and constipation are also very common.

[0377] Childhood disintegrative disorder (CDD), also known as Heller's syndrome and disintegrative psychosis, is characterized by developmental delays in language, social function, and motor skills that appear from the age of 2 to around the age of 10 years of age. CDD is sometimes considered a low-functioning form of autism.

[0378] As used herein, a subject “exhibiting one or more signs or symptoms of a pervasive developmental disorder” includes a subject that suffers from a pervasive developmental disorder, as well as a subject that does not suffer from the developmental disorder but that exhibits subsyndromal manifestations of a pervasive developmental disorder, such as the broad autism phenotype, which is described, for example, in the DSM-IV, in Piven et al. Am J Psychiatry 154: 185-190 (1997) and Losh et al. Am J Med Genet B Neuropsychiatr Genet 147: 424-433 (2008). Identification, quantitation, and/or monitoring of one or more signs or symptoms of a pervasive developmental disorder, particularly autism, can be accomplished using the Autism Diagnostic Observation Schedule (ADOS) (Lord et al., J. Autism Dev Dis. 19:185-212 (1989) incorporated herein by reference) and/or the Revised Autism Diagnostic Interview (ADI-R) (Lord, et al., J. Autism Dev Dis. 24:659-685 (1994). As used herein, one or more signs or symptoms of a pervasive developmental disorder are those signs or symptoms included in the diagnostic criteria for the pervasive developmental disorders and do not include other signs or symptoms commonly observed with pervasive developmental disorder that are not an aspect of the diagnostic criteria e.g., constipation, seizure disorder, mental retardiation, physical malformation resulting in delayed speech, etc.

[0379] A subject “exhibiting one or more sign or symptoms of a pervasive developmental disorder” also includes a nonhuman subject that exhibits such symptoms. Non-human animals that exhibit signs or symptoms of pervasive developmental disorder include animal models of these disorders. A number of mice having various genetic mutations have been suggested for use as models of autism and other pervasive developmental disorders as discussed herein. Drosophila models of fragile X syndrome are known (as discussed below, fragile X genotype is associated with autism) and as well as mouse models of Rett's syndrome.

[0380] A subject that “suffers from” a pervasive developmental disorder includes a subject that has been clinically diagnosed with such a disorder as well as a subject that meets diagnostic criteria for having such a disorder. Diagnostic criteria and methods for diagnosing autism spectrum disorders are discussed in Levy et al and the DSM-IV.

[0381] Diagnostic criteria in the DSM-IV for various pervasive developmental disorders are as follows:

[0382] 299.00 Autistic Disorder
[0383] (A) total of six (or more) items from (1), (2), and (3), with at least two from (1), and one each from (2) and (3):
[0384] (1) qualitative impairment in social interaction, as manifested by at least two of the following:
[0385] (a) marked impairment in the use of multiple nonverbal behaviors such as eye-to-eye gaze, facial expression, body postures, and gestures to regulate social interaction
[0386] (b) failure to develop peer relationships appropriate to developmental level
[0387] (c) a lack of spontaneous seeking to share enjoyment, interests, or achievements with other people (e.g., by a lack of showing, bringing, or pointing out objects of interest)
[0388] (d) lack of social or emotional reciprocity
[0389] (2) qualitative impairments in communication as manifested by at least one of the following:
[0390] (a) delay in, or total lack of, the development of spoken language (not accompanied by an attempt to compensate through alternative modes of communication such as gestures or mime)
[0391] (b) in individuals with adequate speech, marked impairment in the ability to initiate or sustain a conversation with others
[0392] (c) stereotyped and repetitive use of language or idiosyncratic language
[0393] (d) lack of varied, spontaneous make-believe play or social imitative play appropriate to developmental level
[0394] (3) restricted repetitive and stereotyped patterns of behavior, interests, and activities, as manifested by at least one of the following:
[0395] (a) encompassing preoccupation with one or more stereotyped patterns of interest that is abnormal either in intensity or focus
[0396] (b) apparently inflexible adherence to specific, nonfunctional routines or rituals
[0397] (c) stereotyped and repetitive motor mannerisms (e.g., hand or finger flapping or twisting, or complex whole-body movements)
[0398] (d) persistent preoccupation with parts of objects
[0399] (B) Delays or abnormal functioning in at least one of the following areas, with onset prior to age 3 years: (1) social interaction, (2) language as used in social communication, or (3) symbolic or imaginative play.
[0400] (C) The disturbance is not better accounted for by Rett's Disorder or Childhood Disintegrative Disorder.

[0401] 299.80 Rett's Disorder
[0402] (A) All of the following:
[0403] (1) apparently normal prenatal and perinatal development
[0404] (2) apparently normal psychomotor development through the first 5 months after birth
[0405] (3) normal head circumference at birth
[0406] (B) Onset of all of the following after the period of normal development:
[0407] (1) deceleration of head growth between ages 5 and 48 months
[0408] (2) loss of previously acquired purposeful hand skills between ages 5 and 30 months with the subsequent development of stereotyped hand movements (e.g., hand-wringing or hand washing)
[0409] (3) loss of social engagement early in the course (although often social interaction develops later)
[0410] (4) appearance of poorly coordinated gait or trunk movements
[0411] (5) severely impaired expressive and receptive language development with severe psychomotor retardation

[0412] 299.10 Childhood Disintegrative Disorder
[0413] (A) Apparently normal development for at least the first 2 years after birth as manifested by the presence of age-appropriate verbal and nonverbal communication, social relationships, play, and adaptive behavior.
[0414] (B) Clinically significant loss of previously acquired skills (before age 10 years) in at least two of the following areas:
[0415] (1) expressive or receptive language
[0416] (2) social skills or adaptive behavior
[0417] (3) bowel or bladder control
[0418] (4) play
[0419] (5) motor skills
[0420] (C) Abnormalities of functioning in at least two of the following areas: (1) qualitative impairment in social interaction (e.g., impairment in nonverbal behaviors, failure to develop peer relationships, lack of social or emotional reciprocity)
[0421] (2) qualitative impairments in communication (e.g., delay or lack of spoken language, inability to initiate or sustain a conversation, stereotyped and repetitive use of language, lack of varied make-believe play)
[0422] (3) restricted, repetitive, and stereotyped patterns of behavior, interests, and activities, including motor stereotypies and mannerisms

[0423] (D) The disturbance is not better accounted for by another specific Pervasive Developmental Disorder or by Schizophrenia.

[0424] 299.80 Asperger's Disorder
[0425] (A) Qualitative impairment in social interaction, as manifested by at least two of the following:
[0426] (1) marked impairment in the use of multiple nonverbal behaviors such as eye-to-eye gaze, facial expression, body postures, and gestures to regulate social interaction
[0427] (2) failure to develop peer relationships appropriate to developmental level
[0428] (3) a lack of spontaneous seeking to share enjoyment, interests, or achievements with other people (e.g., by a lack of showing, bringing, or pointing out objects of interest to other people) lack of social or emotional reciprocity.
[0429] (B) Restricted repetitive and stereotyped patterns of behavior, interests, and activities, as manifested by at least one of the following:
[0430] (1) encompassing preoccupation with one or more stereotyped and restricted patterns of interest that is abnormal either in intensity or focus
[0431] (2) apparently inflexible adherence to specific, non-functional routines or rituals
[0432] (3) stereotyped and repetitive motor mannerisms (e.g., hand or finger flapping or twisting, or complex whole-body movements)
[0433] (4) persistent preoccupation with parts of objects
[0434] (C) The disturbance causes clinically significant impairment in social, occupational, or other important areas of functioning.
[0435] (D) There is no clinically significant general delay in language (e.g., single words used by age 2 years, communicative phrases used by age 3 years)
[0436] (E) There is no clinically significant delay in cognitive development or in the development of age-appropriate self-help skills, adaptive behavior (other than in social interaction), and curiosity about the environment in childhood.
[0437] (F) Criteria are not met for another specific Pervasive Developmental Disorder or Schizophrenia.

[0438] 299.80 Pervasive Developmental Disorder Not Otherwise Specified (Including Atypical Autism)
[0439] This category should be used when there is a severe and pervasive impairment in the development of reciprocal social interaction or verbal and nonverbal communication skills, or when stereotyped behavior, interests, and activities are present, but the criteria are not met for a specific Pervasive Developmental Disorder, Schizophrenia, Schizotypal Personality Disorder, or Avoidant Personality Disorder. For example, this category includes atypical autism—presentations that do not meet the criteria for Autistic Disorder because of late age of onset, atypical symptomatology, or subthreshold symptomatology, or all of these.

[0440] Genetics of Autism and Pervasive Developmental Disorders

[0441] Autism is considered to be a complex multifactorial disorder involving many genes. Accordingly, several loci have been identified, some or all of which may contribute to the phenotype. Included in this entry is AUTS 1, which has been mapped to chromosome 7q22.

[0442] Other susceptibility loci include AUTS3 (608049), which maps to chromosome 13q14; AUTS4 (608636), which maps to chromosome 15q11; AUTS5 (606053), which maps to chromosome 2q; AUTS6 (609378), which maps to chromosome 17q11; AUTS7 (610676), which maps to chromosome 17q21; AUTS8 (607373), which maps to chromosome 3q25-q27; AUTS9 (611015), which maps to chromosome 7q31; AUTS10 (611016), which maps to chromosome 7q36; AUTS11 (610836), which maps to chromosome 1q41; AUTS12 (610838), which maps to chromosome 21p13-q11; AUTS13 (610908), which maps to chromosome 12q14; AUTS14 (611913), which maps to chromosome 16p11.2; AUTS15 (612100), associated with mutation in the CNTNAP2 gene (604569) on chromosome 7q35-q36; AUTS16 (613410), associated with mutation in the SLC9A9 gene (608396) on chromosome 3q24; and AUTS17 (613436), associated with mutation in the SHANK2 gene (603290) on chromosome 11q13. (NOTE: the symbol ‘AUTS2’ has been used to refer to a gene on chromosome 7q11 (KIAA0442; 607270) and therefore is not used as a part of this autism locus series.)

[0443] Three X-linked forms of autism (AUTSX1; 300425; AUTSX2; 300495; AUTSX3; 300496) are associated with mutations in the NLGN3 (300336), NLGN4 (300427), and MECP2 (300005) genes, respectively.

[0444] In addition to mapping studies, functional candidate gene and proteomic approaches have identified variants in specific genes that may affect susceptibility to the development of autism; see, e.g., the glyoxalase I gene (GLO1; 138750) on chromosome 6p21.3.

[0445] Animal Models of Pervasive Developmental Disorders

[0446] A number of mouse models have been suggested as possibly being relevant for use as models for autism or pervasive developmental disorders. The following are provided as examples of animal models that can be used to study the efficacy and safety of a therapeutic agent, e.g., the proteins listed in Tables 2-6. It is understood that additional animal models are available and will become available in the future that can be used in relation to the instant invention. Most of the mice are commercially available, e.g., from Jackson Laboratories in Bar Harbor, Me. (see, e.g., Mice strain sheds new light on autism JAX® NOTES Issue 512, Winter 2008).

[0447] The neuroligin3 knock out mouse is a targeted mutation strain carries a deletion of exons 2 and 3 of the gene (B6;129-Nlgn3^{tm2.ISud}/J(Tabuchi et al., Science 318(5847):71-6 (2007)). These mice show no alteration in their inhibitory synaptic transmission characteristics. Homozygotes are viable, normal in size and do not display any gross physical abnormalities. It has been suggested that this mutant mouse strain may be useful in studies of synapse formation and/or function and neurodevelopmental defects, such as autism. A second neuroligin3 transgenic mouse was generated with an R451C mutaiton in exon 7 which is flanked by loxP sites B6;129-Nlgn3^{tm1Sud}/J). Mutant mice exhibit enhancements in inhibitory synaptic transmission as well as spacial learning and memory, but show deficits in social interaction. It has been suggested that this mutant mouse strain may be useful in studies of the pathophysiology of autism. When used in conjunction with a Cre recombinase-expressing strain, this strain is useful in generating tissue-specific mutants of the floxed allele. Mice that are homozygous for the targeted mutation are viable, fertile, normal in size and do not display any gross physical abnormalities.

[0448] A transgenic mouse overexpressing rat neuroligin 2 (B6.Cg-Tg(Thy1-Nlgn2)6Hnes/J) has been suggested as a model for autism and Rett's syndrome (Hines et al., J Neurosci 28:6055-67, 2008). Mice hemizygous for the TgNL2 transgene are viable and fertile, but hemizygous females are poor mothers. The TgNL2 transgene encodes a hemagglutinin-tagged rat neuroligin 2 (Nlgn2 or NL2) gene driven by the murine Thy1.2 expression cassette. HA-NL2 transcript and protein is expressed throughout the neuroaxis in neuronal cells (high levels in cortex and limbic structures such as amygdala and hippocampus) and is predominantly localized to inhibitory synaptic contacts. TgNL2.6 mice have moderate to high levels of HA-NL2 expression (approximately 1.6-fold greater than wild type NL2). This overexpression leads to reduced lifespan and body weight, and induces aberrant synapse maturation and altered neuronal excitability that lead to behavioral deficits. Specifically, TgNL2.6 mice manifest disorders reminiscent of autism and/or Rett syndrome; jumping, limb clasping, anxiety, and impaired social interactions. Transgenic mice also exhibit Straub tail, transient episodes of kyphosis, and enhanced incidence of spike-wave discharges.

[0449] Mice with abberant expression of beta3 coding region of the Gabrb3 (gamma-aminobutyric acid (GABA-A) receptor, subunit beta 3) have been suggested for use as a model for autism spectrum disorder (129-Gabrb3^{tm1Geh}/J) (Delorey et al., Behav Brain Res 187:207-20, 2008; Homanics et al., Proc Nati Acad Sci USA 94:4143-8, 1997). The mice demonstrate multiple phenotypic abnormalities including cleft palate, seizures, epilepsy, and sensitivity to anesthetics and ethanol. In addition, the observed behavioral deficits (especially regarding social behaviors) indicate that mutant mice may be a useful model of autism spectrum disorders.

[0450] The BTBR T⁺ tf/J are a spontaneously occuring mutant mouse strain including mutations in at least the tufted (tf) gene and the Disc1 gene (Petkov et al., Genomics 83:902-11, 2004) which is known to be involved in schizophrenia. The mice exhibit a 100% absence of the corpus callosum and a severly reduced hippocampal commissure (Wahlsten D, 2003 Brain Res. 971:47-54). This strain exhibits several symptoms of autism including: reduced social interactions, impaired play, low exploratory behavior, unusual vocalizations and high anxiety as compared to other inbred strains (McFarlane et al., Gen, Brain Behav 7:152-63, 2008; Moy et al., Behav Br Res. 176:4-20, 2007; Scattoni et al., PLoS ONE, 3:e3067, 2008).

[0451] Mice with a mutation in the arginine vasopressin receoptor 1B was generated by replacing the coding region from before the initiating methionine to just upstream of the transmembrane VI region of the endogenous gene with a neomycin resistance cassette. The mice have been suggested to be useful in studies of agressive behavior, social motivation, and appropriate behavioral responses, and may be potential models of autism and agression accompanying dementia and traumatic brain injury (B6;129X1-AvprIb^{tm1Wsy}/J). Mice homozygous for this targeted mutation are viable, fertile, normal in size, exhibit apparently normal sexual behavior, and do not display any gross physical abnormalities. Homozygous mice have been demonstrated to exhibit less social agression, altered chemoinvestigatory behavior, and impaired social recognition (Wersinger et al., Horm Behav 46:638-45, 2004).

[0452] Other mice useful as models for autism or other pervasive developmental disorders can be found using the database at jaxmice.jax.org/query/f?p=205:1:2176162254083441.

### V. MARKERS OF THE INVENTION

[0453] The invention relates to markers (hereinafter “biomarkers”, “markers” or “markers of the invention”). Preferred markers of the invention are the markers listed in Tables 2-6.

[0454] The invention provides nucleic acids and proteins that are encoded by or correspond to the markers (hereinafter “marker nucleic acids” and “marker proteins,” respectively). These markers are particularly useful in screening for the presence of a pervasive developmental disorder, in assessing severity of a pervasive developmental disorder, assessing whether a subject is afflicted with a pervasive developmental disorder, identifying a composition for treating a pervasive developmental disorder, assessing the efficacy of an environmental influencer compound for treating a pervasive developmental disorder, monitoring the progression of a pervasive developmental disorder, prognosing the aggressiveness of a pervasive developmental disorder, prognosing the survival of a subject with a pervasive developmental disorder, prognosing the recurrence of a pervasive developmental disorder and prognosing whether a subject is predisposed to developing a pervasive developmental disorder.

[0455] In some embodiments of the present invention, one or more biomarkers is used in connection with the methods of the present invention. As used herein, the term “one or more biomarkers” is intended to mean that at least one biomarker in a disclosed list of biomarkers is assayed and, in various embodiments, more than one biomarker set forth in the list may be assayed, such as two, three, four, five, ten, twenty, thirty, forty, fifty, more than fifty, or all the biomarkers in the list may be assayed.

[0456] A “marker” is a gene whose altered level of expression in a tissue or cell from its expression level in normal or healthy tissue or cell is associated with a disease state, such as a pervasive developmental disorder (e.g., autism or Alzheimer's disease). A “marker nucleic acid” is a nucleic acid (e.g., mRNA, cDNA) encoded by or corresponding to a marker of the invention. Such marker nucleic acids include DNA (e.g., cDNA) comprising the entire or a partial sequence of any of SEQ ID NO (nts) or the complement of such a sequence. The marker nucleic acids also include RNA comprising the entire or a partial sequence of any SEQ ID NO (nts) or the complement of such a sequence, wherein all thymidine residues are replaced with uridine residues. A “marker protein” is a protein encoded by or corresponding to a marker of the invention. A marker protein comprises the entire or a partial sequence of any of the SEQ ID NO (AAs). The terms “protein” and “polypeptide′ are used interchangeably.

[0457] The “normal” level of expression of a marker is the level of expression of the marker in cells of a human subject or patient not afflicted with a pervasive developmental disorder (e.g., autism or Alzheimer's disease).

[0458] An “over-expression” or “higher level of expression” of a marker refers to an expression level in a test sample that is greater than the standard error of the assay employed to assess expression, and is preferably at least twice, and more preferably three, four, five, six, seven, eight, nine or ten times the expression level of the marker in a control sample (e.g., sample from a healthy subject not having the marker associated disease, i.e., a pervasive developmental disorder) and preferably, the average expression level of the marker in several control samples.

[0459] A “lower level of expression” of a marker refers to an expression level in a test sample that is at least twice, and more preferably three, four, five, six, seven, eight, nine or ten times lower than the expression level of the marker in a control sample (e.g., sample from a healthy subjects not having the marker associated disease, i.e., a pervasive developmental disorder) and preferably, the average expression level of the marker in several control samples.

[0460] A “transcribed polynucleotide” or “nucleotide transcript” is a polynucleotide (e.g. an mRNA, hnRNA, a cDNA, or an analog of such RNA or cDNA) which is complementary to or homologous with all or a portion of a mature mRNA made by transcription of a marker of the invention and normal post-transcriptional processing (e.g. splicing), if any, of the RNA transcript, and reverse transcription of the RNA transcript.

[0461] “Complementary” refers to the broad concept of sequence complementarity between regions of two nucleic acid strands or between two regions of the same nucleic acid strand. It is known that an adenine residue of a first nucleic acid region is capable of forming specific hydrogen bonds (“base pairing”) with a residue of a second nucleic acid region which is antiparallel to the first region if the residue is thymine or uracil. Similarly, it is known that a cytosine residue of a first nucleic acid strand is capable of base pairing with a residue of a second nucleic acid strand which is antiparallel to the first strand if the residue is guanine. A first region of a nucleic acid is complementary to a second region of the same or a different nucleic acid if, when the two regions are arranged in an antiparallel fashion, at least one nucleotide residue of the first region is capable of base pairing with a residue of the second region. Preferably, the first region comprises a first portion and the second region comprises a second portion, whereby, when the first and second portions are arranged in an antiparallel fashion, at least about 50%, and preferably at least about 75%, at least about 90%, or at least about 95% of the nucleotide residues of the first portion are capable of base pairing with nucleotide residues in the second portion. More preferably, all nucleotide residues of the first portion are capable of base pairing with nucleotide residues in the second portion.

[0462] “Homologous” as used herein, refers to nucleotide sequence similarity between two regions of the same nucleic acid strand or between regions of two different nucleic acid strands. When a nucleotide residue position in both regions is occupied by the same nucleotide residue, then the regions are homologous at that position. A first region is homologous to a second region if at least one nucleotide residue position of each region is occupied by the same residue. Homology between two regions is expressed in terms of the proportion of nucleotide residue positions of the two regions that are occupied by the same nucleotide residue. By way of example, a region having the nucleotide sequence 5′-ATTGCC-3′ and a region having the nucleotide sequence 5′-TATGGC-3′ share 50% homology. Preferably, the first region comprises a first portion and the second region comprises a second portion, whereby, at least about 50%, and preferably at least about 75%, at least about 90%, or at least about 95% of the nucleotide residue positions of each of the portions are occupied by the same nucleotide residue. More preferably, all nucleotide residue positions of each of the portions are occupied by the same nucleotide residue.

[0463] “Proteins of the invention” encompass marker proteins and their fragments; variant marker proteins and their fragments; peptides and polypeptides comprising an at least 15 amino acid segment of a marker or variant marker protein; and fusion proteins comprising a marker or variant marker protein, or an at least 15 amino acid segment of a marker or variant marker protein.

[0464] The invention further provides antibodies, antibody derivatives and antibody fragments which specifically bind with the marker proteins and fragments of the marker proteins of the present invention. Unless otherwise specified herewithin, the terms “antibody” and “antibodies” broadly encompass naturally-occurring forms of antibodies (e.g., IgG, IgA, IgM, IgE) and recombinant antibodies such as single-chain antibodies, chimeric and humanized antibodies and multi-specific antibodies, as well as fragments and derivatives of all of the foregoing, which fragments and derivatives have at least an antigenic binding site. Antibody derivatives may comprise a protein or chemical moiety conjugated to an antibody.

[0465] In certain embodiments, where a particular listed gene is associated with more than one treatment conditions, such as at different time periods after a treatment, or treatment by different concentrations of a potential environmental influencer, the fold change for that particular gene refers to the longest recorded treatment time. In other embodiments, the fold change for that particular gene refers to the shortest recorded treatment time. In other embodiments, the fold change for that particular gene refers to treatment by the highest concentration of env-influencer. In other embodiments, the fold change for that particular gene refers to treatment by the lowest concentration of env-influencer. In yet other embodiments, the fold change for that particular gene refers to the modulation (e.g., up- or down-regulation) in a manner that is consistent with the therapeutic effect of the env-influencer.

[0466] In certain embodiments, the positive or negative fold change refers to that of any gene described herein.

[0467] As used herein, “positive fold change” refers to “up-regulation” or “increase (of expression)” of a marker that is listed herein.

[0468] As used herein, “negative fold change” refers to “down-regulation” or “decrease (of expression)” of a marker that is listed herein.

[0469] Various aspects of the invention are described in further detail in the following subsections.

### 1. Isolated Nucleic Acid Molecules

[0470] One aspect of the invention pertains to isolated nucleic acid molecules, including nucleic acids which encode a marker protein or a portion thereof. Isolated nucleic acids of the invention also include nucleic acid molecules sufficient for use as hybridization probes to identify marker nucleic acid molecules, and fragments of marker nucleic acid molecules, e.g., those suitable for use as PCR primers for the amplification or mutation of marker nucleic acid molecules. As used herein, the term “nucleic acid molecule” is intended to include DNA molecules (e.g., cDNA or genomic DNA) and RNA molecules (e.g., mRNA) and analogs of the DNA or RNA generated using nucleotide analogs. The nucleic acid molecule can be single-stranded or double-stranded, but preferably is double-stranded DNA.

[0471] An “isolated” nucleic acid molecule is one which is separated from other nucleic acid molecules which are present in the natural source of the nucleic acid molecule. In one embodiment, an “isolated” nucleic acid molecule is free of sequences (preferably protein-encoding sequences) which naturally flank the nucleic acid (i.e., sequences located at the 5′ and 3′ ends of the nucleic acid) in the genomic DNA of the organism from which the nucleic acid is derived. For example, in various embodiments, the isolated nucleic acid molecule can contain less than about 5 kB, 4 kB, 3 kB, 2 kB, 1 kB, 0.5 kB or 0.1 kB of nucleotide sequences which naturally flank the nucleic acid molecule in genomic DNA of the cell from which the nucleic acid is derived. In another embodiment, an “isolated” nucleic acid molecule, such as a cDNA molecule, can be substantially free of other cellular material, or culture medium when produced by recombinant techniques, or substantially free of chemical precursors or other chemicals when chemically synthesized. A nucleic acid molecule that is substantially free of cellular material includes preparations having less than about 30%, 20%, 10%, or 5% of heterologous nucleic acid (also referred to herein as a “contaminating nucleic acid”).

[0472] A nucleic acid molecule of the present invention can be isolated using standard molecular biology techniques and the sequence information in the database records described herein. Using all or a portion of such nucleic acid sequences, nucleic acid molecules of the invention can be isolated using standard hybridization and cloning techniques (e.g., as described in Sambrook et al., ed., Molecular Cloning: A Laboratory Manual, 2nd ed., Cold Spring Harbor Laboratory Press, Cold Spring Harbor, N.Y., 1989).

[0473] A nucleic acid molecule of the invention can be amplified using cDNA, mRNA, or genomic DNA as a template and appropriate oligonucleotide primers according to standard PCR amplification techniques. The nucleic acid so amplified can be cloned into an appropriate vector and characterized by DNA sequence analysis. Furthermore, nucleotides corresponding to all or a portion of a nucleic acid molecule of the invention can be prepared by standard synthetic techniques, e.g., using an automated DNA synthesizer.

[0474] In another preferred embodiment, an isolated nucleic acid molecule of the invention comprises a nucleic acid molecule which has a nucleotide sequence complementary to the nucleotide sequence of a marker nucleic acid or to the nucleotide sequence of a nucleic acid encoding a marker protein. A nucleic acid molecule which is complementary to a given nucleotide sequence is one which is sufficiently complementary to the given nucleotide sequence that it can hybridize to the given nucleotide sequence thereby forming a stable duplex.

[0475] Moreover, a nucleic acid molecule of the invention can comprise only a portion of a nucleic acid sequence, wherein the full length nucleic acid sequence comprises a marker nucleic acid or which encodes a marker protein. Such nucleic acids can be used, for example, as a probe or primer. The probe/primer typically is used as one or more substantially purified oligonucleotides. The oligonucleotide typically comprises a region of nucleotide sequence that hybridizes under stringent conditions to at least about 7, preferably about 15, more preferably about 25, 50, 75, 100, 125, 150, 175, 200, 250, 300, 350, or 400 or more consecutive nucleotides of a nucleic acid of the invention.

[0476] Probes based on the sequence of a nucleic acid molecule of the invention can be used to detect transcripts or genomic sequences corresponding to one or more markers of the invention. The probe comprises a label group attached thereto, e.g., a radioisotope, a fluorescent compound, an enzyme, or an enzyme co-factor. Such probes can be used as part of a diagnostic test kit for identifying cells or tissues which mis-express the protein, such as by measuring levels of a nucleic acid molecule encoding the protein in a sample of cells from a subject, e.g., detecting mRNA levels or determining whether a gene encoding the protein has been mutated or deleted.

[0477] The invention further encompasses nucleic acid molecules that differ, due to degeneracy of the genetic code, from the nucleotide sequence of nucleic acids encoding a marker protein (e.g., protein having the sequence of the SEQ ID NO (AAs)), and thus encode the same protein.

[0478] It will be appreciated by those skilled in the art that DNA sequence polymorphisms that lead to changes in the amino acid sequence can exist within a population (e.g., the human population). Such genetic polymorphisms can exist among individuals within a population due to natural allelic variation. An allele is one of a group of genes which occur alternatively at a given genetic locus. In addition, it will be appreciated that DNA polymorphisms that affect RNA expression levels can also exist that may affect the overall expression level of that gene (e.g., by affecting regulation or degradation).

[0479] As used herein, the phrase “allelic variant” refers to a nucleotide sequence which occurs at a given locus or to a polypeptide encoded by the nucleotide sequence.

[0480] As used herein, the terms “gene” and “recombinant gene” refer to nucleic acid molecules comprising an open reading frame encoding a polypeptide corresponding to a marker of the invention. Such natural allelic variations can typically result in 1-5% variance in the nucleotide sequence of a given gene. Alternative alleles can be identified by sequencing the gene of interest in a number of different individuals. This can be readily carried out by using hybridization probes to identify the same genetic locus in a variety of individuals. Any and all such nucleotide variations and resulting amino acid polymorphisms or variations that are the result of natural allelic variation and that do not alter the functional activity are intended to be within the scope of the invention.

[0481] In another embodiment, an isolated nucleic acid molecule of the invention is at least 7, 15, 20, 25, 30, 40, 60, 80, 100, 150, 200, 250, 300, 350, 400, 450, 550, 650, 700, 800, 900, 1000, 1200, 1400, 1600, 1800, 2000, 2200, 2400, 2600, 2800, 3000, 3500, 4000, 4500, or more nucleotides in length and hybridizes under stringent conditions to a marker nucleic acid or to a nucleic acid encoding a marker protein. As used herein, the term “hybridizes under stringent conditions” is intended to describe conditions for hybridization and washing under which nucleotide sequences at least 60% (65%, 70%, preferably 75%) identical to each other typically remain hybridized to each other. Such stringent conditions are known to those skilled in the art and can be found in sections 6.3.1-6.3.6 of Current Protocols in Molecular Biology, John Wiley & Sons, N.Y. (1989). A preferred, non-limiting example of stringent hybridization conditions are hybridization in 6× sodium chloride/sodium citrate (SSC) at about 45° C., followed by one or more washes in 0.2×SSC, 0.1% SDS at 50-65° C.

[0482] In addition to naturally-occurring allelic variants of a nucleic acid molecule of the invention that can exist in the population, the skilled artisan will further appreciate that sequence changes can be introduced by mutation thereby leading to changes in the amino acid sequence of the encoded protein, without altering the biological activity of the protein encoded thereby. For example, one can make nucleotide substitutions leading to amino acid substitutions at “non-essential” amino acid residues. A “non-essential” amino acid residue is a residue that can be altered from the wild-type sequence without altering the biological activity, whereas an “essential” amino acid residue is required for biological activity. For example, amino acid residues that are not conserved or only semi-conserved among homologs of various species may be non-essential for activity and thus would be likely targets for alteration. Alternatively, amino acid residues that are conserved among the homologs of various species (e.g., murine and human) may be essential for activity and thus would not be likely targets for alteration.

[0483] Accordingly, another aspect of the invention pertains to nucleic acid molecules encoding a variant marker protein that contain changes in amino acid residues that are not essential for activity. Such variant marker proteins differ in amino acid sequence from the naturally-occurring marker proteins, yet retain biological activity. In one embodiment, such a variant marker protein has an amino acid sequence that is at least about 40% identical, 50%, 60%, 70%, 80%, 90%, 91%, 92%, 93%, 94%, 95%, 96%, 97%, 98% or 99% identical to the amino acid sequence of a marker protein.

[0484] An isolated nucleic acid molecule encoding a variant marker protein can be created by introducing one or more nucleotide substitutions, additions or deletions into the nucleotide sequence of marker nucleic acids, such that one or more amino acid residue substitutions, additions, or deletions are introduced into the encoded protein. Mutations can be introduced by standard techniques, such as site-directed mutagenesis and PCR-mediated mutagenesis. Preferably, conservative amino acid substitutions are made at one or more predicted non-essential amino acid residues. A “conservative amino acid substitution” is one in which the amino acid residue is replaced with an amino acid residue having a similar side chain. Families of amino acid residues having similar side chains have been defined in the art. These families include amino acids with basic side chains (e.g., lysine, arginine, histidine), acidic side chains (e.g., aspartic acid, glutamic acid), uncharged polar side chains (e.g., glycine, asparagine, glutamine, serine, threonine, tyrosine, cysteine), non-polar side chains (e.g., alanine, valine, leucine, isoleucine, proline, phenylalanine, methionine, tryptophan), beta-branched side chains (e.g., threonine, valine, isoleucine) and aromatic side chains (e.g., tyrosine, phenylalanine, tryptophan, histidine). Alternatively, mutations can be introduced randomly along all or part of the coding sequence, such as by saturation mutagenesis, and the resultant mutants can be screened for biological activity to identify mutants that retain activity. Following mutagenesis, the encoded protein can be expressed recombinantly and the activity of the protein can be determined.

[0485] The present invention encompasses antisense nucleic acid molecules, i.e., molecules which are complementary to a sense nucleic acid of the invention, e.g., complementary to the coding strand of a double-stranded marker cDNA molecule or complementary to a marker mRNA sequence. Accordingly, an antisense nucleic acid of the invention can hydrogen bond to (i.e. anneal with) a sense nucleic acid of the invention. The antisense nucleic acid can be complementary to an entire coding strand, or to only a portion thereof, e.g., all or part of the protein coding region (or open reading frame). An antisense nucleic acid molecule can also be antisense to all or part of a non-coding region of the coding strand of a nucleotide sequence encoding a marker protein. The non-coding regions (“5′ and 3′ untranslated regions”) are the 5′ and 3′ sequences which flank the coding region and are not translated into amino acids.

[0486] An antisense oligonucleotide can be, for example, about 5, 10, 15, 20, 25, 30, 35, 40, 45, or 50 or more nucleotides in length. An antisense nucleic acid of the invention can be constructed using chemical synthesis and enzymatic ligation reactions using procedures known in the art. For example, an antisense nucleic acid (e.g., an antisense oligonucleotide) can be chemically synthesized using naturally occurring nucleotides or variously modified nucleotides designed to increase the biological stability of the molecules or to increase the physical stability of the duplex formed between the antisense and sense nucleic acids, e.g., phosphorothioate derivatives and acridine substituted nucleotides can be used. Examples of modified nucleotides which can be used to generate the antisense nucleic acid include 5-fluorouracil, 5-bromouracil, 5-chlorouracil, 5-iodouracil, hypoxanthine, xanthine, 4-acetylcytosine, 5-(carboxyhydroxylmethyl) uracil, 5-carboxymethylaminomethyl-2-thiouridine, 5-carboxymethylaminomethyluracil, dihydrouracil, beta-D-galactosylqueosine, inosine, N6-isopentenyladenine, 1-methylguanine, 1-methylinosine, 2,2-dimethylguanine, 2-methyladenine, 2-methylguanine, 3-methylcytosine, 5-methylcytosine, N6-adenine, 7-methylguanine, 5-methylaminomethyluracil, 5-methoxyaminomethyl-2-thiouracil, beta-D-mannosylqueosine, 5′-methoxycarboxymethyluracil, 5-methoxyuracil, 2-methylthio-N6-isopentenyladenine, uracil-5-oxyacetic acid (v), wybutoxosine, pseudouracil, queosine, 2-thiocytosine, 5-methyl-2-thiouracil, 2-thiouracil, 4-thiouracil, 5-methyluracil, uracil-5-oxyacetic acid methylester, uracil-5-oxyacetic acid (v), 5-methyl-2-thiouracil, 3-(3-amino-3-N-2-carboxypropyl) uracil, (acp3)w, and 2,6-diaminopurine. Alternatively, the antisense nucleic acid can be produced biologically using an expression vector into which a nucleic acid has been sub-cloned in an antisense orientation (i.e., RNA transcribed from the inserted nucleic acid will be of an antisense orientation to a target nucleic acid of interest, described further in the following subsection).

[0487] The antisense nucleic acid molecules of the invention are typically administered to a subject or generated in situ such that they hybridize with or bind to cellular mRNA and/or genomic DNA encoding a marker protein to thereby inhibit expression of the marker, e.g., by inhibiting transcription and/or translation. The hybridization can be by conventional nucleotide complementarity to form a stable duplex, or, for example, in the case of an antisense nucleic acid molecule which binds to DNA duplexes, through specific interactions in the major groove of the double helix. Examples of a route of administration of antisense nucleic acid molecules of the invention includes direct injection at a tissue site or infusion of the antisense nucleic acid into a pervasive developmental disorder-associated body fluid. Alternatively, antisense nucleic acid molecules can be modified to target selected cells and then administered systemically. For example, for systemic administration, antisense molecules can be modified such that they specifically bind to receptors or antigens expressed on a selected cell surface, e.g., by linking the antisense nucleic acid molecules to peptides or antibodies which bind to cell surface receptors or antigens. The antisense nucleic acid molecules can also be delivered to cells using the vectors described herein. To achieve sufficient intracellular concentrations of the antisense molecules, vector constructs in which the antisense nucleic acid molecule is placed under the control of a strong pol II or pol III promoter are preferred.

[0488] An antisense nucleic acid molecule of the invention can be an α-anomeric nucleic acid molecule. An α-anomeric nucleic acid molecule forms specific double-stranded hybrids with complementary RNA in which, contrary to the usual α-units, the strands run parallel to each other (Gaultier et al., 1987, Nucleic Acids Res. 15:6625-6641). The antisense nucleic acid molecule can also comprise a 2′-o-methylribonucleotide (Inoue et al., 1987, Nucleic Acids Res. 15:6131-6148) or a chimeric RNA-DNA analogue (Inoue et al., 1987, FEBS Lett. 215:327-330).

[0489] The invention also encompasses ribozymes. Ribozymes are catalytic RNA molecules with ribonuclease activity which are capable of cleaving a single-stranded nucleic acid, such as an mRNA, to which they have a complementary region. Thus, ribozymes (e.g., hammerhead ribozymes as described in Haselhoff and Gerlach, 1988, Nature 334:585-591) can be used to catalytically cleave mRNA transcripts to thereby inhibit translation of the protein encoded by the mRNA. A ribozyme having specificity for a nucleic acid molecule encoding a marker protein can be designed based upon the nucleotide sequence of a cDNA corresponding to the marker. For example, a derivative of a Tetrahymena L-19 IVS RNA can be constructed in which the nucleotide sequence of the active site is complementary to the nucleotide sequence to be cleaved (see Cech et al. U.S. Pat. No. 4,987,071; and Cech et al. U.S. Pat. No. 5,116,742). Alternatively, an mRNA encoding a polypeptide of the invention can be used to select a catalytic RNA having a specific ribonuclease activity from a pool of RNA molecules (see, e.g., Bartel and Szostak, 1993, Science 261:1411-1418).

[0490] The invention also encompasses nucleic acid molecules which form triple helical structures. For example, expression of a marker of the invention can be inhibited by targeting nucleotide sequences complementary to the regulatory region of the gene encoding the marker nucleic acid or protein (e.g., the promoter and/or enhancer) to form triple helical structures that prevent transcription of the gene in target cells. See generally Helene (1991) Anticancer Drug Des. 6(6):569-84; Helene (1992) Ann. N.Y. Acad. Sci. 660:27-36; and Maher (1992) Bioassays 14(12):807-15.

[0491] In various embodiments, the nucleic acid molecules of the invention can be modified at the base moiety, sugar moiety or phosphate backbone to improve, e.g., the stability, hybridization, or solubility of the molecule. For example, the deoxyribose phosphate backbone of the nucleic acids can be modified to generate peptide nucleic acids (see Hyrup et al., 1996, Bioorganic & Medicinal Chemistry 4(1): 5-23). As used herein, the terms “peptide nucleic acids” or “PNAs” refer to nucleic acid mimics, e.g., DNA mimics, in which the deoxyribose phosphate backbone is replaced by a pseudopeptide backbone and only the four natural nucleobases are retained. The neutral backbone of PNAs has been shown to allow for specific hybridization to DNA and RNA under conditions of low ionic strength. The synthesis of PNA oligomers can be performed using standard solid phase peptide synthesis protocols as described in Hyrup et al. (1996), supra; Perry-O'Keefe et al. (1996) Proc. Natl. Acad. Sci. USA 93:14670-675.

[0492] PNAs can be used in therapeutic and diagnostic applications. For example, PNAs can be used as antisense or antigene agents for sequence-specific modulation of gene expression by, e.g., inducing transcription or translation arrest or inhibiting replication. PNAs can also be used, e.g., in the analysis of single base pair mutations in a gene by, e.g., PNA directed PCR clamping; as artificial restriction enzymes when used in combination with other enzymes, e.g., S1 nucleases (Hyrup (1996), supra; or as probes or primers for DNA sequence and hybridization (Hyrup, 1996, supra; Perry-O'Keefe et al., 1996, Proc. Natl. Acad. Sci. USA 93:14670-675).

[0493] In another embodiment, PNAs can be modified, e.g., to enhance their stability or cellular uptake, by attaching lipophilic or other helper groups to PNA, by the formation of PNA-DNA chimeras, or by the use of liposomes or other techniques of drug delivery known in the art. For example, PNA-DNA chimeras can be generated which can combine the advantageous properties of PNA and DNA. Such chimeras allow DNA recognition enzymes, e.g., RNase H and DNA polymerases, to interact with the DNA portion while the PNA portion would provide high binding affinity and specificity. PNA-DNA chimeras can be linked using linkers of appropriate lengths selected in terms of base stacking, number of bonds between the nucleobases, and orientation (Hyrup, 1996, supra). The synthesis of PNA-DNA chimeras can be performed as described in Hyrup (1996), supra, and Finn et al. (1996) Nucleic Acids Res. 24(17):3357-63. For example, a DNA chain can be synthesized on a solid support using standard phosphoramidite coupling chemistry and modified nucleoside analogs. Compounds such as 5′-(4-methoxytrityl)amino-5′-deoxy-thymidine phosphoramidite can be used as a link between the PNA and the 5′ end of DNA (Mag et al., 1989, Nucleic Acids Res. 17:5973-88). PNA monomers are then coupled in a step-wise manner to produce a chimeric molecule with a 5′ PNA segment and a 3′ DNA segment (Finn et al., 1996, Nucleic Acids Res. 24(17):3357-63). Alternatively, chimeric molecules can be synthesized with a 5′ DNA segment and a 3′ PNA segment (Peterser et al., 1975, Bioorganic Med. Chem. Lett. 5:1119-11124).

[0494] In other embodiments, the oligonucleotide can include other appended groups such as peptides (e.g., for targeting host cell receptors in vivo), or agents facilitating transport across the cell membrane (see, e.g., Letsinger et al., 1989, Proc. Natl. Acad. Sci. USA 86:6553-6556; Lemaitre et al., 1987, Proc. Natl. Acad. Sci. USA 84:648-652; PCT Publication No. WO 88/09810) or the blood-brain barrier (see, e.g., PCT Publication No. WO 89/10134). In addition, oligonucleotides can be modified with hybridization-triggered cleavage agents (see, e.g., Krol et al., 1988, Bio/Techniques 6:958-976) or intercalating agents (see, e.g., Zon, 1988, Pharm. Res. 5:539-549). To this end, the oligonucleotide can be conjugated to another molecule, e.g., a peptide, hybridization triggered cross-linking agent, transport agent, hybridization-triggered cleavage agent, etc.

[0495] The invention also includes molecular beacon nucleic acids having at least one region which is complementary to a nucleic acid of the invention, such that the molecular beacon is useful for quantitating the presence of the nucleic acid of the invention in a sample. A “molecular beacon” nucleic acid is a nucleic acid comprising a pair of complementary regions and having a fluorophore and a fluorescent quencher associated therewith. The fluorophore and quencher are associated with different portions of the nucleic acid in such an orientation that when the complementary regions are annealed with one another, fluorescence of the fluorophore is quenched by the quencher. When the complementary regions of the nucleic acid are not annealed with one another, fluorescence of the fluorophore is quenched to a lesser degree. Molecular beacon nucleic acids are described, for example, in U.S. Pat. No. 5,876,930.

### 2. Isolated Proteins and Antibodies

[0496] One aspect of the invention pertains to isolated marker proteins and biologically active portions thereof, as well as polypeptide fragments suitable for use as immunogens to raise antibodies directed against a marker protein or a fragment thereof. In one embodiment, the native marker protein can be isolated from cells or tissue sources by an appropriate purification scheme using standard protein purification techniques. In another embodiment, a protein or peptide comprising the whole or a segment of the marker protein is produced by recombinant DNA techniques. Alternative to recombinant expression, such protein or peptide can be synthesized chemically using standard peptide synthesis techniques.

[0497] An “isolated” or “purified” protein or biologically active portion thereof is substantially free of cellular material or other contaminating proteins from the cell or tissue source from which the protein is derived, or substantially free of chemical precursors or other chemicals when chemically synthesized. The language “substantially free of cellular material” includes preparations of protein in which the protein is separated from cellular components of the cells from which it is isolated or recombinantly produced. Thus, protein that is substantially free of cellular material includes preparations of protein having less than about 30%, 20%, 10%, or 5% (by dry weight) of heterologous protein (also referred to herein as a “contaminating protein”). When the protein or biologically active portion thereof is recombinantly produced, it is also preferably substantially free of culture medium, i.e., culture medium represents less than about 20%, 10%, or 5% of the volume of the protein preparation. When the protein is produced by chemical synthesis, it is preferably substantially free of chemical precursors or other chemicals, i.e., it is separated from chemical precursors or other chemicals which are involved in the synthesis of the protein. Accordingly such preparations of the protein have less than about 30%, 20%, 10%, 5% (by dry weight) of chemical precursors or compounds other than the polypeptide of interest.

[0498] Biologically active portions of a marker protein include polypeptides comprising amino acid sequences sufficiently identical to or derived from the amino acid sequence of the marker protein, which include fewer amino acids than the full length protein, and exhibit at least one activity of the corresponding full-length protein. Typically, biologically active portions comprise a domain or motif with at least one activity of the corresponding full-length protein. A biologically active portion of a marker protein of the invention can be a polypeptide which is, for example, 10, 25, 50, 100 or more amino acids in length. Moreover, other biologically active portions, in which other regions of the marker protein are deleted, can be prepared by recombinant techniques and evaluated for one or more of the functional activities of the native form of the marker protein.

[0499] Preferred marker proteins are encoded by nucleotide sequences comprising the sequence of any of the SEQ ID NO (nts). Other useful proteins are substantially identical (e.g., at least about 40%, preferably 50%, 60%, 70%, 80%, 90%, 91%, 92%, 93%, 94%, 95%, 96%, 97%, 98% or 99%) to one of these sequences and retain the functional activity of the corresponding naturally-occurring marker protein yet differ in amino acid sequence due to natural allelic variation or mutagenesis.

[0500] To determine the percent identity of two amino acid sequences or of two nucleic acids, the sequences are aligned for optimal comparison purposes (e.g., gaps can be introduced in the sequence of a first amino acid or nucleic acid sequence for optimal alignment with a second amino or nucleic acid sequence). The amino acid residues or nucleotides at corresponding amino acid positions or nucleotide positions are then compared. When a position in the first sequence is occupied by the same amino acid residue or nucleotide as the corresponding position in the second sequence, then the molecules are identical at that position. Preferably, the percent identity between the two sequences is calculated using a global alignment. Alternatively, the percent identity between the two sequences is calculated using a local alignment. The percent identity between the two sequences is a function of the number of identical positions shared by the sequences (i.e., % identity=# of identical positions/total # of positions (e.g., overlapping positions)×100). In one embodiment the two sequences are the same length. In another embodiment, the two sequences are not the same length.

[0501] The determination of percent identity between two sequences can be accomplished using a mathematical algorithm. A preferred, non-limiting example of a mathematical algorithm utilized for the comparison of two sequences is the algorithm of Karlin and Altschul (1990) Proc. Natl. Acad. Sci. USA 87:2264-2268, modified as in Karlin and Altschul (1993) Proc. Natl. Acad. Sci. USA 90:5873-5877. Such an algorithm is incorporated into the BLASTN and BLASTX programs of Altschul, et al. (1990) J. Mol. Biol. 215:403-410. BLAST nucleotide searches can be performed with the BLASTN program, score=100, wordlength=12 to obtain nucleotide sequences homologous to a nucleic acid molecules of the invention. BLAST protein searches can be performed with the BLASTP program, score=50, wordlength=3 to obtain amino acid sequences homologous to a protein molecules of the invention. To obtain gapped alignments for comparison purposes, a newer version of the BLAST algorithm called Gapped BLAST can be utilized as described in Altschul et al. (1997) Nucleic Acids Res. 25:3389-3402, which is able to perform gapped local alignments for the programs BLASTN, BLASTP and BLASTX. Alternatively, PSI-Blast can be used to perform an iterated search which detects distant relationships between molecules. When utilizing BLAST, Gapped BLAST, and PSI-Blast programs, the default parameters of the respective programs (e.g., BLASTX and BLASTN) can be used. See http://www.ncbi.nlm.nih.gov. Another preferred, non-limiting example of a mathematical algorithm utilized for the comparison of sequences is the algorithm of Myers and Miller, (1988) CABIOS 4:11-17. Such an algorithm is incorporated into the ALIGN program (version 2.0) which is part of the GCG sequence alignment software package. When utilizing the ALIGN program for comparing amino acid sequences, a PAM120 weight residue table, a gap length penalty of 12, and a gap penalty of 4 can be used. Yet another useful algorithm for identifying regions of local sequence similarity and alignment is the FASTA algorithm as described in Pearson and Lipman (1988) Proc. Natl. Acad. Sci. USA 85:2444-2448. When using the FASTA algorithm for comparing nucleotide or amino acid sequences, a PAM120 weight residue table can, for example, be used with a k-tuple value of 2.

[0502] The percent identity between two sequences can be determined using techniques similar to those described above, with or without allowing gaps. In calculating percent identity, only exact matches are counted.

[0503] The invention also provides chimeric or fusion proteins comprising a marker protein or a segment thereof. As used herein, a “chimeric protein” or “fusion protein” comprises all or part (preferably a biologically active part) of a marker protein operably linked to a heterologous polypeptide (i.e., a polypeptide other than the marker protein). Within the fusion protein, the term “operably linked” is intended to indicate that the marker protein or segment thereof and the heterologous polypeptide are fused in-frame to each other. The heterologous polypeptide can be fused to the amino-terminus or the carboxyl-terminus of the marker protein or segment.

[0504] One useful fusion protein is a GST fusion protein in which a marker protein or segment is fused to the carboxyl terminus of GST sequences. Such fusion proteins can facilitate the purification of a recombinant polypeptide of the invention.

[0505] In another embodiment, the fusion protein contains a heterologous signal sequence at its amino terminus. For example, the native signal sequence of a marker protein can be removed and replaced with a signal sequence from another protein. For example, the gp67 secretory sequence of the baculovirus envelope protein can be used as a heterologous signal sequence (Ausubel et al., ed., Current Protocols in Molecular Biology, John Wiley & Sons, NY, 1992). Other examples of eukaryotic heterologous signal sequences include the secretory sequences of melittin and human placental alkaline phosphatase (Stratagene; La Jolla, Calif.). In yet another example, useful prokaryotic heterologous signal sequences include the phoA secretory signal (Sambrook et al., supra) and the protein A secretory signal (Pharmacia Biotech; Piscataway, N.J.).

[0506] In yet another embodiment, the fusion protein is an immunoglobulin fusion protein in which all or part of a marker protein is fused to sequences derived from a member of the immunoglobulin protein family. The immunoglobulin fusion proteins of the invention can be incorporated into pharmaceutical compositions and administered to a subject to inhibit an interaction between a ligand (soluble or membrane-bound) and a protein on the surface of a cell (receptor), to thereby suppress signal transduction in vivo. The immunoglobulin fusion protein can be used to affect the bioavailability of a cognate ligand of a marker protein. Inhibition of ligand/receptor interaction can be useful therapeutically, both for treating proliferative and differentiative disorders and for modulating (e.g. promoting or inhibiting) cell survival. Moreover, the immunoglobulin fusion proteins of the invention can be used as immunogens to produce antibodies directed against a marker protein in a subject, to purify ligands and in screening assays to identify molecules which inhibit the interaction of the marker protein with ligands.

[0507] Chimeric and fusion proteins of the invention can be produced by standard recombinant DNA techniques. In another embodiment, the fusion gene can be synthesized by conventional techniques including automated DNA synthesizers. Alternatively, PCR amplification of gene fragments can be carried out using anchor primers which give rise to complementary overhangs between two consecutive gene fragments which can subsequently be annealed and re-amplified to generate a chimeric gene sequence (see, e.g., Ausubel et al., supra). Moreover, many expression vectors are commercially available that already encode a fusion moiety (e.g., a GST polypeptide). A nucleic acid encoding a polypeptide of the invention can be cloned into such an expression vector such that the fusion moiety is linked in-frame to the polypeptide of the invention.

[0508] A signal sequence can be used to facilitate secretion and isolation of marker proteins. Signal sequences are typically characterized by a core of hydrophobic amino acids which are generally cleaved from the mature protein during secretion in one or more cleavage events. Such signal peptides contain processing sites that allow cleavage of the signal sequence from the mature proteins as they pass through the secretory pathway. Thus, the invention pertains to marker proteins, fusion proteins or segments thereof having a signal sequence, as well as to such proteins from which the signal sequence has been proteolytically cleaved (i.e., the cleavage products). In one embodiment, a nucleic acid sequence encoding a signal sequence can be operably linked in an expression vector to a protein of interest, such as a marker protein or a segment thereof. The signal sequence directs secretion of the protein, such as from a eukaryotic host into which the expression vector is transformed, and the signal sequence is subsequently or concurrently cleaved. The protein can then be readily purified from the extracellular medium by art recognized methods. Alternatively, the signal sequence can be linked to the protein of interest using a sequence which facilitates purification, such as with a GST domain.

[0509] The present invention also pertains to variants of the marker proteins. Such variants have an altered amino acid sequence which can function as either agonists (mimetics) or as antagonists. Variants can be generated by mutagenesis, e.g., discrete point mutation or truncation. An agonist can retain substantially the same, or a subset, of the biological activities of the naturally occurring form of the protein. An antagonist of a protein can inhibit one or more of the activities of the naturally occurring form of the protein by, for example, competitively binding to a downstream or upstream member of a cellular signaling cascade which includes the protein of interest. Thus, specific biological effects can be elicited by treatment with a variant of limited function. Treatment of a subject with a variant having a subset of the biological activities of the naturally occurring form of the protein can have fewer side effects in a subject relative to treatment with the naturally occurring form of the protein.

[0510] Variants of a marker protein which function as either agonists (mimetics) or as antagonists can be identified by screening combinatorial libraries of mutants, e.g., truncation mutants, of the protein of the invention for agonist or antagonist activity. In one embodiment, a variegated library of variants is generated by combinatorial mutagenesis at the nucleic acid level and is encoded by a variegated gene library. A variegated library of variants can be produced by, for example, enzymatically ligating a mixture of synthetic oligonucleotides into gene sequences such that a degenerate set of potential protein sequences is expressible as individual polypeptides, or alternatively, as a set of larger fusion proteins (e.g., for phage display). There are a variety of methods which can be used to produce libraries of potential variants of the marker proteins from a degenerate oligonucleotide sequence. Methods for synthesizing degenerate oligonucleotides are known in the art (see, e.g., Narang, 1983, Tetrahedron 39:3; Itakura et al., 1984, Annu. Rev. Biochem. 53:323; Itakura et al., 1984, Science 198:1056; Ike et al., 1983 Nucleic Acid Res. 11:477).

[0511] In addition, libraries of segments of a marker protein can be used to generate a variegated population of polypeptides for screening and subsequent selection of variant marker proteins or segments thereof. For example, a library of coding sequence fragments can be generated by treating a double stranded PCR fragment of the coding sequence of interest with a nuclease under conditions wherein nicking occurs only about once per molecule, denaturing the double stranded DNA, renaturing the DNA to form double stranded DNA which can include sense/antisense pairs from different nicked products, removing single stranded portions from reformed duplexes by treatment with S1 nuclease, and ligating the resulting fragment library into an expression vector. By this method, an expression library can be derived which encodes amino terminal and internal fragments of various sizes of the protein of interest.

[0512] Several techniques are known in the art for screening gene products of combinatorial libraries made by point mutations or truncation, and for screening cDNA libraries for gene products having a selected property. The most widely used techniques, which are amenable to high through-put analysis, for screening large gene libraries typically include cloning the gene library into replicable expression vectors, transforming appropriate cells with the resulting library of vectors, and expressing the combinatorial genes under conditions in which detection of a desired activity facilitates isolation of the vector encoding the gene whose product was detected. Recursive ensemble mutagenesis (REM), a technique which enhances the frequency of functional mutants in the libraries, can be used in combination with the screening assays to identify variants of a protein of the invention (Arkin and Yourvan, 1992, Proc. Natl. Acad. Sci. USA 89:7811-7815; Delgrave et al., 1993, Protein Engineering 6(3):327-331).

[0513] Another aspect of the invention pertains to antibodies directed against a protein of the invention. In preferred embodiments, the antibodies specifically bind a marker protein or a fragment thereof. The terms “antibody” and “antibodies” as used interchangeably herein refer to immunoglobulin molecules as well as fragments and derivatives thereof that comprise an immunologically active portion of an immunoglobulin molecule, (i.e., such a portion contains an antigen binding site which specifically binds an antigen, such as a marker protein, e.g., an epitope of a marker protein). An antibody which specifically binds to a protein of the invention is an antibody which binds the protein, but does not substantially bind other molecules in a sample, e.g., a biological sample, which naturally contains the protein. Examples of an immunologically active portion of an immunoglobulin molecule include, but are not limited to, single-chain antibodies (scAb), F(ab) and F(ab′)₂ fragments.

[0514] An isolated protein of the invention or a fragment thereof can be used as an immunogen to generate antibodies. The full-length protein can be used or, alternatively, the invention provides antigenic peptide fragments for use as immunogens. The antigenic peptide of a protein of the invention comprises at least 8 (preferably 10, 15, 20, or 30 or more) amino acid residues of the amino acid sequence of one of the proteins of the invention, and encompasses at least one epitope of the protein such that an antibody raised against the peptide forms a specific immune complex with the protein. Preferred epitopes encompassed by the antigenic peptide are regions that are located on the surface of the protein, e.g., hydrophilic regions. Hydrophobicity sequence analysis, hydrophilicity sequence analysis, or similar analyses can be used to identify hydrophilic regions. In preferred embodiments, an isolated marker protein or fragment thereof is used as an immunogen.

[0515] An immunogen typically is used to prepare antibodies by immunizing a suitable (i.e. immunocompetent) subject such as a rabbit, goat, mouse, or other mammal or vertebrate. An appropriate immunogenic preparation can contain, for example, recombinantly-expressed or chemically-synthesized protein or peptide. The preparation can further include an adjuvant, such as Freund's complete or incomplete adjuvant, or a similar immunostimulatory agent. Preferred immunogen compositions are those that contain no other human proteins such as, for example, immunogen compositions made using a non-human host cell for recombinant expression of a protein of the invention. In such a manner, the resulting antibody compositions have reduced or no binding of human proteins other than a protein of the invention.

[0516] The invention provides polyclonal and monoclonal antibodies. The term “monoclonal antibody” or “monoclonal antibody composition”, as used herein, refers to a population of antibody molecules that contain only one species of an antigen binding site capable of immunoreacting with a particular epitope. Preferred polyclonal and monoclonal antibody compositions are ones that have been selected for antibodies directed against a protein of the invention. Particularly preferred polyclonal and monoclonal antibody preparations are ones that contain only antibodies directed against a marker protein or fragment thereof.

[0517] Polyclonal antibodies can be prepared by immunizing a suitable subject with a protein of the invention as an immunogen The antibody titer in the immunized subject can be monitored over time by standard techniques, such as with an enzyme linked immunosorbent assay (ELISA) using immobilized polypeptide. At an appropriate time after immunization, e.g., when the specific antibody titers are highest, antibody-producing cells can be obtained from the subject and used to prepare monoclonal antibodies (mAb) by standard techniques, such as the hybridoma technique originally described by Kohler and Milstein (1975) Nature 256:495-497, the human B cell hybridoma technique (see Kozbor et al., 1983, Immunol. Today 4:72), the EBV-hybridoma technique (see Cole et al., pp. 77-96 In Monoclonal Antibodies and Cancer Therapy, Alan R. Liss, Inc., 1985) or trioma techniques. The technology for producing hybridomas is well known (see generally Current Protocols in Immunology, Coligan et al. ed., John Wiley & Sons, New York, 1994). Hybridoma cells producing a monoclonal antibody of the invention are detected by screening the hybridoma culture supernatants for antibodies that bind the polypeptide of interest, e.g., using a standard ELISA assay.

[0518] Alternative to preparing monoclonal antibody-secreting hybridomas, a monoclonal antibody directed against a protein of the invention can be identified and isolated by screening a recombinant combinatorial immunoglobulin library (e.g., an antibody phage display library) with the polypeptide of interest. Kits for generating and screening phage display libraries are commercially available (e.g., the Pharmacia Recombinant Phage Antibody System, Catalog No. 27-9400-01; and the Stratagene SurfZAP Phage Display Kit, Catalog No. 240612). Additionally, examples of methods and reagents particularly amenable for use in generating and screening antibody display library can be found in, for example, U.S. Pat. No. 5,223,409; PCT Publication No. WO 92/18619; PCT Publication No. WO 91/17271; PCT Publication No. WO 92/20791; PCT Publication No. WO 92/15679; PCT Publication No. WO 93/01288; PCT Publication No. WO 92/01047; PCT Publication No. WO 92/09690; PCT Publication No. WO 90/02809; Fuchs et al. (1991) Bio/Technology 9:1370-1372; Hay et al. (1992) Hum. Antibod. Hybridomas 3:81-85; Huse et al. (1989) Science 246:1275-1281; Griffiths et al. (1993) EMBO J. 12:725-734.

[0519] The invention also provides recombinant antibodies that specifically bind a protein of the invention. In preferred embodiments, the recombinant antibodies specifically binds a marker protein or fragment thereof. Recombinant antibodies include, but are not limited to, chimeric and humanized monoclonal antibodies, comprising both human and non-human portions, single-chain antibodies and multi-specific antibodies. A chimeric antibody is a molecule in which different portions are derived from different animal species, such as those having a variable region derived from a murine mAb and a human immunoglobulin constant region. (See, e.g., Cabilly et al., U.S. Pat. No. 4,816,567; and Boss et al., U.S. Pat. No. 4,816,397, which are incorporated herein by reference in their entirety.) Single-chain antibodies have an antigen binding site and consist of a single polypeptide. They can be produced by techniques known in the art, for example using methods described in Ladner et. al U.S. Pat. No. 4,946,778 (which is incorporated herein by reference in its entirety); Bird et al., (1988) Science 242:423-426; Whitlow et al., (1991) Methods in Enzymology 2:1-9; Whitlow et al., (1991) Methods in Enzymology 2:97-105; and Huston et al., (1991) Methods in Enzymology Molecular Design and Modeling: Concepts and Applications 203:46-88. Multi-specific antibodies are antibody molecules having at least two antigen-binding sites that specifically bind different antigens. Such molecules can be produced by techniques known in the art, for example using methods described in Segal, U.S. Pat. No. 4,676,980 (the disclosure of which is incorporated herein by reference in its entirety); Holliger et al., (1993) Proc. Natl. Acad. Sci. USA 90:6444-6448; Whitlow et al., (1994) Protein Eng. 7:1017-1026 and U.S. Pat. No. 6,121,424.

[0520] Humanized antibodies are antibody molecules from non-human species having one or more complementarity determining regions (CDRs) from the non-human species and a framework region from a human immunoglobulin molecule. (See, e.g., Queen, U.S. Pat. No. 5,585,089, which is incorporated herein by reference in its entirety.) Humanized monoclonal antibodies can be produced by recombinant DNA techniques known in the art, for example using methods described in PCT Publication No. WO 87/02671; European Patent Application 184,187; European Patent Application 171,496; European Patent Application 173,494; PCT Publication No. WO 86/01533; U.S. Pat. No. 4,816,567; European Patent Application 125,023; Better et al. (1988) Science 240:1041-1043; Liu et al. (1987) Proc. Natl. Acad. Sci. USA 84:3439-3443; Liu et al. (1987) J. Immunol. 139:3521-3526; Sun et al. (1987) Proc. Natl. Acad. Sci. USA 84:214-218; Nishimura et al. (1987) Cancer Res. 47:999-1005; Wood et al. (1985) Nature 314:446-449; and Shaw et al. (1988) J. Natl. Cancer Inst. 80:1553-1559); Morrison (1985) Science 229:1202-1207; Oi et al. (1986) Bio/Techniques 4:214; U.S. Pat. No. 5,225,539; Jones et al. (1986) Nature 321:552-525; Verhoeyan et al. (1988) Science 239:1534; and Beidler et al. (1988) J. Immunol. 141:4053-4060.

[0521] More particularly, humanized antibodies can be produced, for example, using transgenic mice which are incapable of expressing endogenous immunoglobulin heavy and light chains genes, but which can express human heavy and light chain genes. The transgenic mice are immunized in the normal fashion with a selected antigen, e.g., all or a portion of a polypeptide corresponding to a marker of the invention. Monoclonal antibodies directed against the antigen can be obtained using conventional hybridoma technology. The human immunoglobulin transgenes harbored by the transgenic mice rearrange during B cell differentiation, and subsequently undergo class switching and somatic mutation. Thus, using such a technique, it is possible to produce therapeutically useful IgG, IgA and IgE antibodies. For an overview of this technology for producing human antibodies, see Lonberg and Huszar (1995) Int. Rev. Immunol. 13:65-93). For a detailed discussion of this technology for producing human antibodies and human monoclonal antibodies and protocols for producing such antibodies, see, e.g., U.S. Pat. No. 5,625,126; U.S. Pat. No. 5,633,425; U.S. Pat. No. 5,569,825; U.S. Pat. No. 5,661,016; and U.S. Pat. No. 5,545,806. In addition, companies such as Abgenix, Inc. (Freemont, Calif.), can be engaged to provide human antibodies directed against a selected antigen using technology similar to that described above.

[0522] Completely human antibodies which recognize a selected epitope can be generated using a technique referred to as “guided selection.” In this approach a selected non-human monoclonal antibody, e.g., a murine antibody, is used to guide the selection of a completely human antibody recognizing the same epitope (Jespers et al., 1994, Bio/technology 12:899-903).

[0523] The antibodies of the invention can be isolated after production (e.g., from the blood or serum of the subject) or synthesis and further purified by well-known techniques. For example, IgG antibodies can be purified using protein A chromatography. Antibodies specific for a protein of the invention can be selected or (e.g., partially purified) or purified by, e.g., affinity chromatography. For example, a recombinantly expressed and purified (or partially purified) protein of the invention is produced as described herein, and covalently or non-covalently coupled to a solid support such as, for example, a chromatography column. The column can then be used to affinity purify antibodies specific for the proteins of the invention from a sample containing antibodies directed against a large number of different epitopes, thereby generating a substantially purified antibody composition, i.e., one that is substantially free of contaminating antibodies. By a substantially purified antibody composition is meant, in this context, that the antibody sample contains at most only 30% (by dry weight) of contaminating antibodies directed against epitopes other than those of the desired protein of the invention, and preferably at most 20%, yet more preferably at most 10%, and most preferably at most 5% (by dry weight) of the sample is contaminating antibodies. A purified antibody composition means that at least 99% of the antibodies in the composition are directed against the desired protein of the invention.

[0524] In a preferred embodiment, the substantially purified antibodies of the invention may specifically bind to a signal peptide, a secreted sequence, an extracellular domain, a transmembrane or a cytoplasmic domain or cytoplasmic membrane of a protein of the invention. In a particularly preferred embodiment, the substantially purified antibodies of the invention specifically bind to a secreted sequence or an extracellular domain of the amino acid sequences of a protein of the invention. In a more preferred embodiment, the substantially purified antibodies of the invention specifically bind to a secreted sequence or an extracellular domain of the amino acid sequences of a marker protein.

[0525] An antibody directed against a protein of the invention can be used to isolate the protein by standard techniques, such as affinity chromatography or immunoprecipitation. Moreover, such an antibody can be used to detect the marker protein or fragment thereof (e.g., in a cellular lysate or cell supernatant) in order to evaluate the level and pattern of expression of the marker. The antibodies can also be used diagnostically to monitor protein levels in tissues or body fluids (e.g. in a pervasive developmental disorder-associated body fluid) as part of a clinical testing procedure, e.g., to, for example, determine the efficacy of a given treatment regimen. Detection can be facilitated by the use of an antibody derivative, which comprises an antibody of the invention coupled to a detectable substance. Examples of detectable substances include various enzymes, prosthetic groups, fluorescent materials, luminescent materials, bioluminescent materials, and radioactive materials. Examples of suitable enzymes include horseradish peroxidase, alkaline phosphatase, β-galactosidase, or acetylcholinesterase; examples of suitable prosthetic group complexes include streptavidin/biotin and avidin/biotin; examples of suitable fluorescent materials include umbelliferone, fluorescein, fluorescein isothiocyanate, rhodamine, dichlorotriazinylamine fluorescein, dansyl chloride or phycoerythrin; an example of a luminescent material includes luminol; examples of bioluminescent materials include luciferase, luciferin, and aequorin, and examples of suitable radioactive material include ¹²⁵ I, ¹³¹I, ³⁵S or ³H.

[0526] Antibodies of the invention may also be used as therapeutic agents in treating pervasive developmental disorders. In a preferred embodiment, completely human antibodies of the invention are used for therapeutic treatment of human patients suffering from a pervasive developmental disorder. In another preferred embodiment, antibodies that bind specifically to a marker protein or fragment thereof are used for therapeutic treatment. Further, such therapeutic antibody may be an antibody derivative or immunotoxin comprising an antibody conjugated to a therapeutic moiety such as a cytotoxin, a therapeutic agent or a radioactive metal ion. A cytotoxin or cytotoxic agent includes any agent that is detrimental to cells. Examples include taxol, cytochalasin B, gramicidin D, ethidium bromide, emetine, mitomycin, etoposide, tenoposide, vincristine, vinblastine, colchicin, doxorubicin, daunorubicin, dihydroxy anthracin dione, mitoxantrone, mithramycin, actinomycin D, 1-dehydrotestosterone, glucocorticoids, procaine, tetracaine, lidocaine, propranolol, and puromycin and analogs or homologs thereof. Therapeutic agents include, but are not limited to, antimetabolites (e.g., methotrexate, 6-mercaptopurine, 6-thioguanine, cytarabine, 5-fluorouracil decarbazine), alkylating agents (e.g., mechlorethamine, thioepa chlorambucil, melphalan, carmustine (BSNU) and lomustine (CCNU), cyclothosphamide, busulfan, dibromomannitol, streptozotocin, mitomycin C, and cis-dichlorodiamine platinum (II) (DDP) cisplatin), anthracyclines (e.g., daunorubicin (formerly daunomycin) and doxorubicin), antibiotics (e.g., dactinomycin (formerly actinomycin), bleomycin, mithramycin, and anthramycin (AMC)), and anti-mitotic agents (e.g., vincristine and vinblastine).

[0527] The conjugated antibodies of the invention can be used for modifying a given biological response, for the drug moiety is not to be construed as limited to classical chemical therapeutic agents. For example, the drug moiety may be a protein or polypeptide possessing a desired biological activity. Such proteins may include, for example, a toxin such as ribosome-inhibiting protein (see Better et al., U.S. Pat. No. 6,146,631, the disclosure of which is incorporated herein in its entirety), abrin, ricin A, pseudomonas exotoxin, or diphtheria toxin; a protein such as tumor necrosis factor, .alpha.-interferon, β-interferon, nerve growth factor, platelet derived growth factor, tissue plasminogen activator; or, biological response modifiers such as, for example, lymphokines, interleukin-1 (“IL-1”), interleukin-2 (“IL-2”), interleukin-6 (“IL-6”), granulocyte macrophase colony stimulating factor (“GM-CSF”), granulocyte colony stimulating factor (“G-CSF”), or other growth factors.

[0528] Techniques for conjugating such therapeutic moiety to antibodies are well known, see, e.g., Amon et al., “Monoclonal Antibodies For Immunotargeting Of Drugs In Cancer Therapy”, in Monoclonal Antibodies And Cancer Therapy, Reisfeld et al. (eds.), pp. 243-56 (Alan R. Liss, Inc. 1985); Hellstrom et al., “Antibodies For Drug Delivery”, in Controlled Drug Delivery (2nd Ed.), Robinson et al. (eds.), pp. 623-53 (Marcel Dekker, Inc. 1987); Thorpe, “Antibody Carriers Of Cytotoxic Agents In Cancer Therapy: A Review”, in Monoclonal Antibodies '84: Biological And Clinical Applications, Pinchera et al. (eds.), pp. 475-506 (1985); “Analysis, Results, And Future Prospective Of The Therapeutic Use Of Radiolabeled Antibody In Cancer Therapy”, in Monoclonal Antibodies For Cancer Detection And Therapy, Baldwin et al. (eds.), pp. 303-16 (Academic Press 1985), and Thorpe et al., “The Preparation And Cytotoxic Properties Of Antibody-Toxin Conjugates”, Immunol. Rev., 62:119-58 (1982).

[0529] Accordingly, in one aspect, the invention provides substantially purified antibodies, antibody fragments and derivatives, all of which specifically bind to a protein of the invention and preferably, a marker protein. In various embodiments, the substantially purified antibodies of the invention, or fragments or derivatives thereof, can be human, non-human, chimeric and/or humanized antibodies. In another aspect, the invention provides non-human antibodies, antibody fragments and derivatives, all of which specifically bind to a protein of the invention and preferably, a marker protein. Such non-human antibodies can be goat, mouse, sheep, horse, chicken, rabbit, or rat antibodies. Alternatively, the non-human antibodies of the invention can be chimeric and/or humanized antibodies. In addition, the non-human antibodies of the invention can be polyclonal antibodies or monoclonal antibodies. In still a further aspect, the invention provides monoclonal antibodies, antibody fragments and derivatives, all of which specifically bind to a protein of the invention and preferably, a marker protein. The monoclonal antibodies can be human, humanized, chimeric and/or non-human antibodies.

[0530] The invention also provides a kit containing an antibody of the invention conjugated to a detectable substance, and instructions for use. Still another aspect of the invention is a pharmaceutical composition comprising an antibody of the invention. In one embodiment, the pharmaceutical composition comprises an antibody of the invention and a pharmaceutically acceptable carrier.

### 3. Sequences of Markers of the Invention

[0531] Information about the markers of the invention are described in detail in below. Sequences of the markers of the invention are listed in the concurrently filed Sequence Listing.

### AHSA1

[0532] Official Symbol: AHSA1
[0533] Official Name: AHA1, activator of heat shock 90 kDa protein ATPase homolog 1 (yeast)
[0534] Gene ID: 10598
[0535] Organism: Homo sapiens
[0536] Other Aliases: HSPC322, AHA1, Cl4orf3, p38
[0537] Other Designations: activator of 90 kDa heat shock protein ATPase homolog 1
[0538] Nucleotide sequence:
   [0539] NCBI Reference Sequence: NM_{—}012111.2
   [0540] LOCUS: NM_{—}012111
   [0541] ACCESSION: NM_{—}012111
   [0542] VERSION NM_{—}012111.2 GI:224451069
   [0543] SEQ ID NO: 1
[0544] Protein sequence:
   [0545] NCBI Reference Sequence: NP_{—}036243.1
   [0546] LOCUS NP_{—}036243
   [0547] ACCESSION NP_{—}036243
   [0548] VERSION NP_{—}036243.1 GI:6912280
   [0549] SEQ ID NO: 2

### AHSG

[0550] Official Symbol: AHSG
[0551] Official Name: alpha-2-HS-glycoprotein
[0552] Gene ID: 197
[0553] Organism: Homo sapiens
[0554] Other Aliases: PRO2743, A2HS, AHS, FETUA, HSGA
[0555] Other Designations: alpha-2-Z-globulin; ba-alpha-2-glycoprotein; fetuin-A
[0556] Nucleotide sequence:
   [0557] NCBI Reference Sequence: NM_{—}001622.2
   [0558] LOCUS: NM_{—}001622
   [0559] ACCESSION: NM_{—}001622
   [0560] VERSION NM_{—}001622.2 GI:156523969
   [0561] SEQ ID NO: 3
[0562] Protein sequence:
   [0563] NCBI Reference Sequence: NP_{—}001613.2
   [0564] LOCUS NP_{—}001613
   [0565] ACCESSION NP_{—}001613
   [0566] VERSION NP_{—}001613.2 GI:156523970
   [0567] SEQ ID NO: 4

### ANXA6

[0568] Official Symbol: ANXA6
[0569] Official Name: annexin A6
[0570] Gene ID: 309
[0571] Organism: Homo sapiens
[0572] Other Aliases: ANX6, CBP68
[0573] Other Designations: 67 kDa calelectrin; CPB-II; annexin VI (p68); annexin-6; calcium-binding protein p68; calelectrin; calphobindin II; calphobindin-II; chromobindin-20; lipocortin VI; p68; p70
[0574] Nucleotide sequence: transcript variant 1
   [0575] NCBI Reference Sequence: NM_{—}001155.4
   [0576] LOCUS: NM_{—}001155
   [0577] ACCESSION: NM_{—}001155
   [0578] VERSION NM_{—}001155.4 GI:302129650
   [0579] SEQ ID NO: 5
[0580] Protein sequence: isoform 1
   [0581] NCBI Reference Sequence: NP_{—}001146.2
   [0582] LOCUS NP_{—}001146
   [0583] ACCESSION NP_{—}001146
   [0584] VERSION NP_{—}001146.2 GI:71773329
   [0585] SEQ ID NO: 6
[0586] Nucleotide sequence: transcript variant 2
   [0587] NCBI Reference Sequence: NM_{—}001193544.1
   [0588] LOCUS: NM_{—}001193544
   [0589] ACCESSION: NM_{—}001193544
   [0590] VERSION NM_{—}001193544.1 GI:302129651
   [0591] SEQ ID NO: 7
[0592] Protein sequence: isoform 2
   [0593] NCBI Reference Sequence: NP_{—}001180473.1
   [0594] LOCUS NP_{—}001180473
   [0595] ACCESSION NP_{—}001180473
   [0596] VERSION NP_{—}001180473.1 GI:302129652
   [0597] SEQ ID NO: 8

### AP1S1

[0598] Official Symbol: AP1S1
[0599] Official Name: adaptor-related protein complex 1, sigma 1 subunit
[0600] Gene ID: 1174
[0601] Organism: Homo sapiens
[0602] Other Aliases: AP19, CLAPS1, MEDNIK, SIGMA1A, WUGSC:H_DJ0747G18.2
[0603] Other Designations: AP-1 complex subunit sigma-1A; HA1 19 kDa subunit; adapter-related protein complex 1 sigma-1A subunit; clathrin assembly protein complex 1 sigma-1A small chain; clathrin coat assembly protein AP19; clathrin-associated/assembly/adaptor protein, small 1 (19kD); golgi adaptor HA1/AP1 adaptin sigma-1A subunit; sigma1A subunit of AP-1 clathrin adaptor complex; sigma1A-adaptin
[0604] Nucleotide sequence:
   [0605] NCBI Reference Sequence: NM_{—}001283.3
   [0606] LOCUS: NM_{—}001283
   [0607] ACCESSION: NM_{—}001283
   [0608] VERSION NM_{—}001283.3 GI:148536831
   [0609] SEQ ID NO: 9
[0610] Protein sequence:
   [0611] NCBI Reference Sequence: NP_{—}001274.1
   [0612] LOCUS NP_{—}001274
   [0613] ACCESSION NP_{—}001274
   [0614] VERSION NP_{—}001274.1 GI:4557471
   [0615] SEQ ID NO: 10

### APMAP

[0616] Official Symbol: APMAP
[0617] Official Name: adipocyte plasma membrane associated protein
[0618] Gene ID: 57136
[0619] Organism: Homo sapiens
[0620] Other Aliases: RP4-568C11.2, BSCv, C20orf3
[0621] Other Designations: adipocyte plasma membrane-associated protein; protein BSCv
[0622] Nucleotide sequence:
   [0623] NCBI Reference Sequence: NM_{—}020531.2
   [0624] LOCUS: NM_{—}020531
   [0625] ACCESSION: NM_{—}020531
   [0626] VERSION NM_{—}020531.2 GI:41327713
   [0627] SEQ ID NO: 11
[0628] Protein sequence:
   [0629] NCBI Reference Sequence: NP_{—}065392.1
   [0630] LOCUS NP_{—}065392
   [0631] ACCESSION NP_{—}065392
   [0632] VERSION NP_{—}065392.1 GI:24308201
   [0633] SEQ ID NO: 12

### CAPG

[0634] Official Symbol: CAPG
[0635] Official Name: capping protein (actin filament), gelsolin-like
[0636] Gene ID: 822
[0637] Organism: Homo sapiens
[0638] Other Aliases: AFCP, MCP
[0639] Other Designations: actin regulatory protein CAP-G; actin-regulatory protein CAP-G; gelsolin-like capping protein; macrophage capping protein; macrophage-capping protein
[0640] Nucleotide sequence: transcript variant 2
   [0641] NCBI Reference Sequence: NM_{—}001256139.1
   [0642] LOCUS: NM_{—}001256139
   [0643] ACCESSION: NM_{—}001256139
   [0644] VERSION NM_{—}001256139.1 GI:371502124
   [0645] SEQ ID NO: 13
[0646] Protein sequence: isoform 1
   [0647] NCBI Reference Sequence: NP_{—}001243068.1
   [0648] LOCUS NP_{—}001243068
   [0649] ACCESSION NP_{—}001243068
   [0650] VERSION NP_{—}001243068.1 GI:371502125
   [0651] SEQ ID NO: 14
[0652] Nucleotide sequence: transcript variant 3
   [0653] NCBI Reference Sequence: NM_{—}001256140.1
   [0654] LOCUS: NM_{—}001256140
   [0655] ACCESSION: NM_{—}001256140
   [0656] VERSION NM_{—}001256140.1 GI:371502126
   [0657] SEQ ID NO: 15
[0658] Protein sequence: isoform 2
   [0659] NCBI Reference Sequence: NP_{—}001243069.1
   [0660] LOCUS NP_{—}001243069
   [0661] ACCESSION NP_{—}001243069
   [0662] VERSION NP_{—}001243069.1 GI:371502127
   [0663] SEQ ID NO: 16
[0664] Nucleotide sequence: transcript variant 1
   [0665] NCBI Reference Sequence: NM_{—}001747.3
   [0666] LOCUS: NM_{—}001747
   [0667] ACCESSION: NM_{—}001747
   [0668] VERSION NM_{—}001747.3 GI:371502123
   [0669] SEQ ID NO: 17
[0670] Protein sequence: isoform 1
   [0671] NCBI Reference Sequence: NP_{—}001738.2
   [0672] LOCUS NP_{—}001738
   [0673] ACCESSION NP_{—}001738
   [0674] VERSION NP_{—}001738.2 GI:63252913
   [0675] SEQ ID NO: 18

### CORO1A

[0676] Official Symbol: CORO1A
[0677] Official Name: coronin, actin binding protein, 1A
[0678] Gene ID: 11151
[0679] Organism: Homo sapiens
[0680] Other Aliases: CLABP, CLIPINA, HCORO1, TACO, p57
[0681] Other Designations: clipin-A; coronin-1; coronin-1A; coronin-like protein A; coronin-like protein p57; tryptophan aspartate-containing coat protein
[0682] Nucleotide sequence:
   [0683] NCBI Reference Sequence: NM_{—}001193333.2
   [0684] LOCUS: NM_{—}001193333
   [0685] ACCESSION: NM_{—}001193333
   [0686] VERSION NM_{—}001193333.2 GI:306482594
   [0687] SEQ ID NO: 19
[0688] Protein sequence:
   [0689] NCBI Reference Sequence: NP_{—}001180262.1
   [0690] LOCUS NP_{—}001180262
   [0691] ACCESSION NP_{—}001180262
   [0692] VERSION NP_{—}001180262.1 GI:300934762
   [0693] SEQ ID NO: 20
[0694] Nucleotide sequence: transcript variant 2
   [0695] NCBI Reference Sequence: NM_{—}007074.3
   [0696] LOCUS: NM_{—}007074
   [0697] ACCESSION: NM_{—}007074
   [0698] VERSION NM_{—}007074.3 GI:306482593
   [0699] SEQ ID NO: 21
[0700] Protein sequence:
   [0701] NCBI Reference Sequence: NP_{—}009005.1
   [0702] LOCUS NP_{—}009005
   [0703] ACCESSION NP_{—}009005
   [0704] VERSION NP_{—}009005.1 GI:5902134
   [0705] SEQ ID NO: 22

### COTL1

[0706] Official Symbol: COTL1
[0707] Official Name: coactosin-like 1 (Dictyostelium)
[0708] Gene ID: 23406
[0709] Organism: Homo sapiens
[0710] Other Aliases: CLP
[0711] Other Designations: coactosin-like protein
[0712] Nucleotide sequence:
   [0713] NCBI Reference Sequence: NM_{—}021149.2
   [0714] LOCUS: NM_{—}021149
   [0715] ACCESSION: NM_{—}021149
   [0716] VERSION NM_{—}021149.2 GI:23510452
   [0717] SEQ ID NO: 23
[0718] Protein sequence:
   [0719] NCBI Reference Sequence: NP_{—}066972.1
   [0720] LOCUS NP_{—}066972
   [0721] ACCESSION NP_{—}066972
   [0722] VERSION NP_{—}066972.1 GI:21624607
   [0723] SEQ ID NO: 24

### CPDX

[0724] Official Symbol: CPDX
[0725] Official Name:
[0726] Gene ID: 1371
[0727] Organism: Homo sapiens
[0728] Other Aliases: CPO, CPX, HCP
[0729] Other Designations: COX; coprogen oxidase; coproporphyrinogen-III oxidase, mitochondrial; coproporphyrinogenase
[0730] Nucleotide sequence:
   [0731] NCBI Reference Sequence: NM_{—}000097.5
   [0732] LOCUS: NM_{—}000097
   [0733] ACCESSION: NM_{—}000097
   [0734] VERSION NM_{—}000097.5 GI:261862333
   [0735] SEQ ID NO: 25
[0736] Protein sequence:
   [0737] NCBI Reference Sequence: NP_{—}000088.3
   [0738] LOCUS NP_{—}000088
   [0739] ACCESSION NP_{—}000088
   [0740] VERSION NP_{—}000088.3 GI:41393599
   [0741] SEQ ID NO: 26

### CPSF6

[0742] Official Symbol: CPSF6
[0743] Official Name: cleavage and polyadenylation specific factor 6, 68 kDa
[0744] Gene ID: 11052
[0745] Organism: Homo sapiens
[0746] Other Aliases: CFIM, CFIM68, HPBRII-4, HPBRII-7
[0747] Other Designations: CPSF 68 kDa subunit; cleavage and polyadenylation specificity factor 68 kDa subunit; cleavage and polyadenylation specificity factor subunit 6; pre-mRNA cleavage factor I, 68 kD subunit; pre-mRNA cleavage factor Im (68 kD); pre-mRNA cleavage factor Im 68 kDa subunit; protein HPBRII-4/7
[0748] Nucleotide sequence:
   [0749] NCBI Reference Sequence: NM_{—}007007.2
   [0750] LOCUS: NM_{—}007007
   [0751] ACCESSION: NM_{—}007007
   [0752] VERSION NM_{—}007007.2 GI:162329582
   [0753] SEQ ID NO: 27
[0754] Protein sequence:
   [0755] NCBI Reference Sequence: NP_{—}008938.2
   [0756] LOCUS NP_{—}008938
   [0757] ACCESSION NP_{—}008938
   [0758] VERSION NP_{—}008938.2 GI:162329583
   [0759] SEQ ID NO: 28

### CUX1

[0760] Official Symbol: CUX1
[0761] Official Name: cut-like homeobox 1
[0762] Gene ID: 1523
[0763] Organism: Homo sapiens
[0764] Other Aliases: CASP, CDP, CDP/Cut, CDP1, COY1, CUTL1, CUX, Clox, Cux/CDP, GOLIM6, Nbla10317, p100, p110, p200, p75
[0765] Other Designations: CCAAT displacement protein; cut homolog; golgi integral membrane protein 6; homeobox protein cux-1; protein CASP; putative protein product of Nb1a10317
[0766] Nucleotide sequence: transcript variant 4
   [0767] NCBI Reference Sequence: NM_{—}001202543.1
   [0768] LOCUS: NM_{—}001202543
   [0769] ACCESSION: NM_{—}001202543
   [0770] VERSION: NM_{—}001202543.1 GI:321400106
   [0771] SEQ ID NO: 29
[0772] Protein sequence: isoform d
   [0773] NCBI Reference Sequence: NP_{—}001189472.1
   [0774] LOCUS NP_{—}001189472
   [0775] ACCESSION NP_{—}001189472
   [0776] VERSION: NP_{—}001189472.1 GI:321400107
   [0777] SEQ ID NO: 30
[0778] Nucleotide sequence: transcript variant 5
   [0779] NCBI Reference Sequence: NM_{—}001202544.1
   [0780] LOCUS: NM_{—}001202544
   [0781] ACCESSION: NM_{—}001202544
   [0782] VERSION: NM_{—}001202544.1 GI:321400111
   [0783] SEQ ID NO: 31
[0784] Protein sequence: isoform e
   [0785] NCBI Reference Sequence: NP_{—}001189473.1
   [0786] LOCUS NP_{—}001189473
   [0787] ACCESSION NP_{—}001189473
   [0788] VERSION: NP_{—}001189473.1 GI:321400112
   [0789] SEQ ID NO: 32
[0790] Nucleotide sequence: transcript variant 6
   [0791] NCBI Reference Sequence: NM_{—}001202545.1
   [0792] LOCUS: NM_{—}001202545
   [0793] ACCESSION: NM_{—}001202545 XR_{—}108855 XR_{—}110720 XR_{—}113043
[0794] XR_{—}114073
   [0795] VERSION: NM_{—}001202545.1 GI:321400113
   [0796] SEQ ID NO: 33
[0797] Protein sequence: isoform f
   [0798] NCBI Reference Sequence: NP_{—}001189474.1
   [0799] LOCUS NP_{—}001189474
   [0800] ACCESSION NP_{—}001189474
   [0801] VERSION: NP_{—}001189474.1 GI:321400114
   [0802] SEQ ID NO: 34
[0803] Nucleotide sequence: transcript variant 7
   [0804] NCBI Reference Sequence: NM_{—}001202546.1
   [0805] LOCUS: NM_{—}001202546
   [0806] ACCESSION: NM_{—}001202546
   [0807] VERSION: NM_{—}001202546.1 GI:321400115
   [0808] SEQ ID NO: 35
[0809] Protein sequence: isoform g
   [0810] NCBI Reference Sequence: NP_{—}001189475.1
   [0811] LOCUS NP_{—}001189475
   [0812] ACCESSION NP_{—}001189475
   [0813] VERSION: NP_{—}001189475.1 GI:321400116
   [0814] SEQ ID NO: 36
[0815] Nucleotide sequence: transcript variant 2
   [0816] NCBI Reference Sequence: NM_{—}001913.3
   [0817] LOCUS: NM_{—}001913
   [0818] ACCESSION: NM_{—}001913
   [0819] VERSION: NM_{—}001913.3 GI:321400109
   [0820] SEQ ID NO: 37
[0821] Protein sequence: isoform b
   [0822] NCBI Reference Sequence: NP_{—}001904.2
   [0823] LOCUS NP_{—}001904
   [0824] ACCESSION NP_{—}001904
   [0825] VERSION: NP_{—}001904.2 GI:31652236
   [0826] SEQ ID NO: 38
[0827] Nucleotide sequence: transcript variant 3
   [0828] NCBI Reference Sequence: NM_{—}181500.2
   [0829] LOCUS: NM_{—}181500
   [0830] ACCESSION: NM_{—}181500
   [0831] VERSION: NM_{—}181500.2 GI:321400110
   [0832] SEQ ID NO: 39
[0833] Protein sequence: isoform c
   [0834] NCBI Reference Sequence: NP_{—}852477.1
   [0835] LOCUS NP_{—}852477
   [0836] ACCESSION NP_{—}852477
   [0837] VERSION: NP_{—}852477.1 GI:31652238
   [0838] SEQ ID NO: 40
[0839] Nucleotide sequence: transcript variant 1
   [0840] NCBI Reference Sequence: NM_{—}181552.3
   [0841] LOCUS: NM 181552
   [0842] ACCESSION: NM_{—}181552
   [0843] VERSION: NM 181552.3 GI:321400108
   [0844] SEQ ID NO: 41
[0845] Protein sequence: isoform a
   [0846] NCBI Reference Sequence: NP_{—}853530.2
   [0847] LOCUS NP_{—}853530
   [0848] ACCESSION NP_{—}853530
   [0849] VERSION: NP_{—}853530.2 GI:148277064
   [0850] SEQ ID NO: 42

### DDX39A

[0851] Official Symbol: DDX39A
[0852] Official Name: DEAD (Asp-Glu-Ala-Asp) box polypeptide 39A (“DEAD” disclosed as SEQ ID NO: 244)
[0853] Gene ID: 10212
[0854] Organism: Homo sapiens
[0855] Other Aliases: BAT1, BAT1L, DDX39, DDXL, URH49
[0856] Other Designations: ATP-dependent RNA helicase DDX39A; DEAD (Asp-Glu-Ala-Asp) (SEQ ID NO: 244) box polypeptide 39 transcript; DEAD (SEQ ID NO: 244) box protein 39; DEAD/H (Asp-Glu-Ala-Asp/His) (SEQ ID NO: 245) box polypeptide 39; UAP56-related helicase, 49 kDa; nuclear RNA helicase URH49; nuclear RNA helicase, DECD variant (SEQ ID NO: 246) of DEAD box family (“DEAD” disclosed as SEQ ID NO: 244)
[0857] Nucleotide sequence:
   [0858] NCBI Reference Sequence: NM_{—}005804.3
   [0859] LOCUS: NM_{—}005804
   [0860] ACCESSION: NM_{—}005804
   [0861] VERSION NM_{—}005804.3 GI:308522777
   [0862] SEQ ID NO: 43
[0863] Protein sequence:
   [0864] NCBI Reference Sequence: NP_{—}005795.2
   [0865] LOCUS NP_{—}005795
   [0866] ACCESSION NP_{—}005795
   [0867] VERSION NP_{—}005795.2 GI:21040371
   [0868] SEQ ID NO: 44

### DDX6

[0869] Official Symbol: DDX6
[0870] Official Name: DEAD (Asp-Glu-Ala-Asp) box helicase 6 (“DEAD” disclosed as SEQ ID NO: 244)
[0871] Gene ID: 1656
[0872] Organism: Homo sapiens
[0873] Other Aliases: HLR2, P54, RCK
[0874] Other Designations: ATP-dependent RNA helicase p54; DEAD (Asp-Glu-Ala-Asp) (SEQ ID NO: 244) box polypeptide 6; DEAD (SEQ ID NO: 244) box protein 6; DEAD (SEQ ID NO: 244) box-6; DEAD/H (Asp-Glu-Ala-Asp/His) (SEQ ID NO: 245) box polypeptide 6 (RNA helicase, 54 kD); oncogene RCK; probable ATP-dependent RNA helicase DDX6
[0875] Nucleotide sequence: transcript variant 2
   [0876] NCBI Reference Sequence: NM_{—}001257191.1
   [0877] LOCUS: NM_{—}001257191
   [0878] ACCESSION: NM_{—}001257191
   [0879] VERSION: NM_{—}001257191.1 GI:380692341
   [0880] SEQ ID NO: 45
[0881] Protein sequence:
   [0882] NCBI Reference Sequence: NP_{—}001244120.1
   [0883] LOCUS NP_{—}001244120
   [0884] ACCESSION NP_{—}001244120
   [0885] VERSION: NP_{—}001244120.1 GI:380692342
   [0886] SEQ ID NO: 46
[0887] Nucleotide sequence: transcript variant 1
   [0888] NCBI Reference Sequence: NM_{—}004397.4
   [0889] LOCUS: NM_{—}004397
   [0890] ACCESSION: NM_{—}004397
   [0891] VERSION: NM_{—}004397.4 GI:164664517
   [0892] SEQ ID NO: 47
[0893] Protein sequence:
   [0894] NCBI Reference Sequence: NP_{—}004388.2
   [0895] LOCUS NP_{—}004388
   [0896] ACCESSION NP_{—}004388
   [0897] VERSION: NP_{—}004388.2 GI:164664518
   [0898] SEQ ID NO: 48

### DIABLO

[0899] Official Symbol: DIABLO
[0900] Official Name: diablo, IAP-binding mitochondrial protein
[0901] Gene ID: 56616
[0902] Organism: Homo sapiens
[0903] Other Aliases: hCG_{—}1782202, DFNA64, DIABLO-S, SMAC, SMAC3
[0904] Other Designations: 0610041G12Rik; diablo homolog, mitochondrial; direct IAP-binding protein with low pI; mitochondrial Smac protein; second mitochondria-derived activator of caspase
[0905] Nucleotide sequence: mitochondrial isoform 1 precursor
   [0906] NCBI Reference Sequence: NM_{—}019887.4
   [0907] LOCUS: NM_{—}019887
   [0908] ACCESSION: NM_{—}019887
   [0909] VERSION: NM_{—}019887.4 GI:218505810
   [0910] SEQ ID NO: 49
[0911] Protein sequence: Isoform 1
   [0912] NCBI Reference Sequence: NP_{—}063940.1
   [0913] LOCUS NP_{—}063940
   [0914] ACCESSION: NP_{—}063940
   [0915] VERSION: NP_{—}063940.1 GI:9845297
   [0916] SEQ ID NO: 50
[0917] Nucleotide sequence: mitochondrial isoform 3 precursor
   [0918] NCBI Reference Sequence: NM_{—}138929.3
   [0919] LOCUS: NM_{—}138929
   [0920] ACCESSION: NM_{—}138929
   [0921] VERSION: NM 138929.3 GI:218505811
   [0922] SEQ ID NO: 51
[0923] Protein sequence: Isoform 3
   [0924] NCBI Reference Sequence: NP_{—}620307.1
   [0925] LOCUS: NP_{—}620307
   [0926] ACCESSION: NP 620307
   [0927] VERSION: NP 620307.1 GI:21070976
   [0928] SEQ ID NO: 52

### EIF3B

[0929] Official Symbol: EIF3B
[0930] Official Name: eukaryotic translation initiation factor 3, subunit B
[0931] Gene ID: 8662
[0932] Organism: Homo sapiens
[0933] Other Aliases: EIF3-ETA, EIF3-P110, EIF3-P116, EIF3S9, PRT1
[0934] Other Designations: eIF-3-eta; eIF3p110; eIF3p116; eukaryotic translation initiation factor 3 subunit 9; eukaryotic translation initiation factor 3 subunit B; eukaryotic translation initiation factor 3, subunit 9 (eta, 116 kD); eukaryotic translation initiation factor 3, subunit 9 eta, 116 kDa; hPrt1; prt1 homolog
[0935] Nucleotide sequence:
   [0936] NCBI Reference Sequence: NM_{—}001037283.1
   [0937] LOCUS: NM_{—}001037283
   [0938] ACCESSION: NM_{—}001037283
   [0939] VERSION: NM_{—}001037283.1 GI:83367071
   [0940] SEQ ID NO: 53
[0941] Protein sequence:
   [0942] NCBI Reference Sequence: NP_{—}001032360.1
   [0943] LOCUS NP_{—}001032360
   [0944] ACCESSION NP_{—}001032360
   [0945] VERSION: NP_{—}001032360.1 GI:83367072
   [0946] SEQ ID NO: 54
[0947] Nucleotide sequence:
   [0948] NCBI Reference Sequence: NM_{—}003751.3
   [0949] LOCUS: NM_{—}003751
   [0950] ACCESSION: NM_{—}003751
   [0951] VERSION: NM_{—}003751.3 GI:83367073
   [0952] SEQ ID NO: 55
[0953] Protein sequence:
   [0954] NCBI Reference Sequence: NP_{—}003742.2
   [0955] LOCUS NP_{—}003742
   [0956] ACCESSION NP_{—}003742
   [0957] VERSION: NP_{—}003742.2 GI:33239445
   [0958] SEQ ID NO: 56

### EIF3G

[0959] Official Symbol: EIF3G
[0960] Official Name: eukaryotic translation initiation factor 3, subunit G
[0961] Gene ID: 8666
[0962] Organism: Homo sapiens
[0963] Other Aliases: EIF3-P42, EIF3S4, eIF3-delta, eIF3-p44
[0964] Other Designations: eIF-3 RNA-binding subunit; eIF-3-delta; eIF3p42; eIF3p44; eukaryotic translation initiation factor 3 RNA-binding subunit; eukaryotic translation initiation factor 3 subunit 4; eukaryotic translation initiation factor 3 subunit G; eukaryotic translation initiation factor 3 subunit p42; eukaryotic translation initiation factor 3, subunit 4 (delta, 44 kD); eukaryotic translation initiation factor 3, subunit 4 delta, 44 kDa
[0965] Nucleotide sequence:
   [0966] NCBI Reference Sequence: NM_{—}003755.3
   [0967] LOCUS: NM_{—}003755
   [0968] ACCESSION: NM_{—}003755
   [0969] VERSION: NM_{—}003755.3 GI:83281440
   [0970] SEQ ID NO: 57
[0971] Protein sequence:
   [0972] NCBI Reference Sequence: NP_{—}003746.2
   [0973] LOCUS NP_{—}003746
   [0974] ACCESSION NP_{—}003746
   [0975] VERSION: NP_{—}003746.2 GI:49472822
   [0976] SEQ ID NO: 58

### EIF3L

[0977] Official Symbol: EIF3L
[0978] Official Name: eukaryotic translation initiation factor 3, subunit L
[0979] Gene ID: 51386
[0980] Organism: Homo sapiens
[0981] Other Aliases: AL022311.1, EIF3EIP, EIF3S11, EIF3S6IP, HSPC021, HSPC025, MSTP005
[0982] Other Designations: eIEF associated protein HSPC021; eukaryotic translation initiation factor 3 subunit 6-interacting protein; eukaryotic translation initiation factor 3 subunit E-interacting protein; eukaryotic translation initiation factor 3 subunit L
[0983] Nucleotide sequence: Isoform 1
   [0984] NCBI Reference Sequence: NM_{—}016091.3
   [0985] LOCUS: NM_{—}016091
   [0986] ACCESSION: NM_{—}016091
   [0987] VERSION: NM_{—}016091.3 GI:339275829
   [0988] SEQ ID NO: 59
[0989] Protein sequence: Isoform 1
   [0990] NCBI Reference Sequence: NP_{—}057175.1
   [0991] LOCUS NP_{—}057175
   [0992] ACCESSION NP_{—}057175
   [0993] VERSION: NP_{—}057175.1 GI:7705433
   [0994] SEQ ID NO: 60
[0995] Nucleotide sequence: Isoform 2
   [0996] NCBI Reference Sequence: NM_{—}001242923.1
   [0997] LOCUS: NM_{—}001242923
   [0998] ACCESSION: NM_{—}001242923
   [0999] VERSION: NM_{—}001242923.1 GI:339275830
   [1000] SEQ ID NO: 61
[1001] Protein sequence: Isoform 2
   [1002] NCBI Reference Sequence: NP_{—}001229852.1
   [1003] LOCUS NP_{—}001229852
   [1004] ACCESSION NP_{—}001229852
   [1005] VERSION: NP_{—}001229852.1 GI:339275831
   [1006] SEQ ID NO: 62

[1007] EIF4A2
[1008] Official Symbol: EIF4A2
[1009] Official Name: eukaryotic translation initiation factor 4A2
[1010] Gene ID: 1974
[1011] Organism: Homo sapiens
[1012] Other Aliases: BM-010, DDX2B, EIF4A, EIF4F, eIF-4A-II, eIF4A-II
[1013] Other Designations: ATP-dependent RNA helicase eIF4A-2; eukaryotic initiation factor 4A-II; eukaryotic translation initiation factor 4A
[1014] Nucleotide sequence:
   [1015] NCBI Reference Sequence: NM_{—}001967.3
   [1016] LOCUS: NM_{—}001967
   [1017] ACCESSION: NM_{—}001967
   [1018] VERSION: NM_{—}001967.3 GI:83700234
   [1019] SEQ ID NO: 63
[1020] Protein sequence:
   [1021] NCBI Reference Sequence: NP_{—}001958.2
   [1022] LOCUS NP_{—}001958
   [1023] ACCESSION NP_{—}001958
   [1024] VERSION: NP_{—}001958.2 GI:83700235
   [1025] SEQ ID NO: 64

### ERAP1

[1026] Official Symbol: ERAP1
[1027] Official Name: endoplasmic reticulum aminopeptidase 1
[1028] Gene ID: 51752
[1029] Organism: Homo sapiens
[1030] Other Aliases: UNQ584/PRO1154, A-LAP, ALAP, APPILS, ARTS-1, ARTS1, ERAAP, ERAAP1, PILS-AP, PILSAP
[1031] Other Designations: adipocyte-derived leucine aminopeptidase; aminopeptidase PILS; aminopeptidase regulator of TNFR1 shedding; endoplasmic reticulum aminopeptidase associated with antigen processing; puromycin-insensitive leucyl-specific aminopeptidase; type 1 tumor necrosis factor receptor shedding aminopeptidase regulator
[1032] Nucleotide sequence: Transcript variant 2
   [1033] NCBI Reference Sequence: NM_{—}001040458.1
   [1034] LOCUS: NM_{—}001040458
   [1035] ACCESSION: NM_{—}001040458
   [1036] VERSION: NM_{—}001040458.1 GI:94818890
   [1037] SEQ ID NO: 65
[1038] Protein sequence: Variant 2
   [1039] NCBI Reference Sequence: NP_{—}001035548.1
   [1040] LOCUS NP_{—}001035548
   [1041] ACCESSION NP_{—}001035548
   [1042] VERSION: NP_{—}001035548.1 GI:94818891
   [1043] SEQ ID NO: 66
[1044] Nucleotide sequence: Transcript variant 1
   [1045] NCBI Reference Sequence: NM_{—}016442.3
   [1046] LOCUS: NM_{—}016442
   [1047] ACCESSION: NM_{—}016442
   [1048] VERSION: NM_{—}016442.3 GI:94818900
   [1049] SEQ ID NO: 67
[1050] Protein sequence: Variant 1
   [1051] NCBI Reference Sequence: NP_{—}057526.3
   [1052] LOCUS NP_{—}057526
   [1053] ACCESSION NP_{—}057526
   [1054] VERSION: NP_{—}057526.3 GI:94818901
   [1055] SEQ ID NO: 68
[1056] Nucleotide sequence: Transcript variant 3
   [1057] NCBI Reference Sequence: NM_{—}001198541.1
   [1058] LOCUS: NM_{—}001198541
   [1059] ACCESSION: NM_{—}001198541
   [1060] VERSION: NM_{—}001198541.1 GI:309747090
   [1061] SEQ ID NO: 69
[1062] Protein sequence: Variant 3
   [1063] NCBI Reference Sequence: NP_{—}001185470.1
   [1064] LOCUS NP_{—}001185470
   [1065] ACCESSION NP_{—}001185470
   [1066] VERSION: NP_{—}001185470.1 GI:309747091
   [1067] SEQ ID NO: 70

### ERP44

[1068] Official Symbol: ERP44
[1069] Official Name: endoplasmic reticulum protein 44
[1070] Gene ID: 23071
[1071] Organism: Homo sapiens
[1072] Other Aliases: UNQ532/PRO1075, PDIA10, TXNDC4
[1073] Other Designations: ER protein 44; endoplasmic reticulum resident protein 44; endoplasmic reticulum resident protein 44 kDa; protein disulfide isomerase family A, member 10; thioredoxin domain containing 4 (endoplasmic reticulum); thioredoxin domain-containing protein 4 Nucleotide sequence:
   [1074] NCBI Reference Sequence: NM_{—}015051.1
   [1075] LOCUS: NM_{—}015051
   [1076] ACCESSION: NM_{—}015051
   [1077] VERSION: NM_{—}015051.1 GI:52487190
   [1078] SEQ ID NO: 71
[1079] Protein sequence:
   [1080] NCBI Reference Sequence: NP_{—}055866.1
   [1081] LOCUS NP_{—}055866
   [1082] ACCESSION NP_{—}055866
   [1083] VERSION: NP_{—}055866.1 GI:52487191
   [1084] SEQ ID NO: 72

### ETFB

[1085] Official Symbol: ETFB
[1086] Official Name: electron-transfer-flavoprotein, beta polypeptide
[1087] Gene ID: 2109
[1088] Organism: Homo sapiens
[1089] Other Aliases: FP585, MADD
[1090] Other Designations: beta-ETF; electron transfer flavoprotein beta subunit; electron transfer flavoprotein beta-subunit; electron transfer flavoprotein subunit beta; electron transfer flavoprotein, beta polypeptide; electron-transferring-flavoprotein, beta polypeptide
[1091] Nucleotide sequence: Isoform 1
   [1092] NCBI Reference Sequence: NM_{—}001985.2
   [1093] LOCUS: NM_{—}001985
   [1094] ACCESSION: NM_{—}001985
   [1095] VERSION: NM_{—}001985.2 GI:62420878
   [1096] SEQ ID NO: 73
[1097] Protein sequence: Isoform 1
   [1098] NCBI Reference Sequence: NP_{—}001976.1
   [1099] LOCUS NP_{—}001976
   [1100] ACCESSION NP_{—}001976
   [1101] VERSION: NP_{—}001976.1 GI:4503609
   [1102] SEQ ID NO: 74
[1103] Nucleotide sequence: Isoform 2
   [1104] NCBI Reference Sequence: NM_{—}001014763.1
   [1105] LOCUS: NM_{—}001014763
   [1106] ACCESSION: NM_{—}001014763
   [1107] VERSION: NM_{—}001014763.1 GI:62420876
   [1108] SEQ ID NO: 75
[1109] Protein sequence: Isoform 2
   [1110] NCBI Reference Sequence: NP_{—}001014763.1
   [1111] LOCUS NP_{—}001014763
   [1112] ACCESSION NP_{—}001014763
   [1113] VERSION: NP_{—}001014763.1 GI:62420877
   [1114] SEQ ID NO: 76

### FARSA

[1115] Official Symbol: FARSA
[1116] Official Name: phenylalanyl-tRNA synthetase, alpha subunit
[1117] Gene ID: 2193
[1118] Organism: Homo sapiens
[1119] Other Aliases: CML33, FARSL, FARSLA, FRSA, PheHA
[1120] Other Designations: pheRS; phenylalanine tRNA ligase 1, alpha, cytoplasmic; phenylalanine--tRNA ligase alpha chain; phenylalanine--tRNA ligase alpha subunit; phenylalanine-tRNA synthetase alpha-subunit; phenylalanine-tRNA synthetase-like, alpha subunit; phenylalanyl-tRNA synthetase alpha chain; phenylalanyl-tRNA synthetase-like, alpha subunit
[1121] Nucleotide sequence:
   [1122] NCBI Reference Sequence: NM_{—}004461.2
   [1123] LOCUS: NM_{—}004461
   [1124] ACCESSION: NM_{—}004461
   [1125] VERSION: NM_{—}004461.2 GI:126517492
   [1126] SEQ ID NO: 77
[1127] Protein sequence:
   [1128] NCBI Reference Sequence: NP_{—}004452.1
   [1129] LOCUS NP_{—}004452
   [1130] ACCESSION NP_{—}004452
   [1131] VERSION: NP_{—}004452.1 GI:4758340
   [1132] SEQ ID NO: 78

### FKBP4

[1133] Official Symbol: FKBP4
[1134] Official Name: FK506 binding protein 4, 59 kDa
[1135] Gene ID: 2288
[1136] Organism: Homo sapiens
[1137] Other Aliases: FKBP51, FKBP52, FKBP59, HBI, Hsp56, PPIase, p52
[1138] Other Designations: 51 kDa FK506-binding protein; FK506-binding protein 4 (59 kD); HSP binding immunophilin; T-cell FK506-binding protein, 59 kD; peptidyl-prolyl cis-trans isomerase FKBP4; peptidylprolyl cis-trans isomerase; rotamase
[1139] Nucleotide sequence:
   [1140] NCBI Reference Sequence: NM_{—}002014.3
   [1141] LOCUS: NM_{—}002014
   [1142] ACCESSION: NM_{—}002014
   [1143] VERSION: NM_{—}002014.3 GI:206725538
   [1144] SEQ ID NO: 79
[1145] Protein sequence:
   [1146] NCBI Reference Sequence: NP_{—}002005.1
   [1147] LOCUS NP_{—}002005
   [1148] ACCESSION NP_{—}002005
   [1149] VERSION: NP_{—}002005.1 GI:4503729
   [1150] SEQ ID NO: 80

### GET4

[1151] Official Symbol: GET4
[1152] Official Name: golgi to ER traffic protein 4 homolog
[1153] Gene ID: 51608
[1154] Organism: Homo sapiens
[1155] Other Aliases: CEE; TRC35; CGI-20; C7orf20
[1156] Other Designations: Golgi to ER traffic protein 4 homolog; H_NH1244M04.5; conserved edge expressed protein; conserved edge protein; conserved edge-expressed protein; transmembrane domain recognition complex 35 kDa subunit; transmembrane domain recognition complex, 35 kDa
[1157] Nucleotide sequence:
   [1158] NCBI Reference Sequence: NM_{—}015949.2
   [1159] LOCUS: NM_{—}015949
   [1160] ACCESSION: NM_{—}015949
   [1161] VERSION: NM_{—}015949.2 GI:38570061
   [1162] SEQ ID NO: 81
[1163] Protein sequence:
   [1164] NCBI Reference Sequence: NP_{—}057033.2
   [1165] LOCUS: NP_{—}057033
   [1166] ACCESSION: NP_{—}057033
   [1167] VERSION: NP_{—}057033.2 GI:38570062
   [1168] SEQ ID NO: 82

[1169] GLUD1
[1170] Official Symbol: GLUD1
[1171] Official Name: glutamate dehydrogenase 1
[1172] Gene ID: 2746
[1173] Organism: Homo sapiens
[1174] Other Aliases: GDH; GDH1; GLUD
[1175] Other Designations: GDH 1; glutamate dehydrogenase (NAD(P)+); glutamate dehydrogenase 1, mitochondrial
[1176] Nucleotide sequence:
   [1177] NCBI Reference Sequence: NM_{—}005271.3
   [1178] LOCUS: NM_{—}005271
   [1179] ACCESSION: NM_{—}005271
   [1180] VERSION: NM_{—}005271.3 GI:260064010
   [1181] SEQ ID NO: 83
[1182] Protein sequence:
   [1183] NCBI Reference Sequence: NP_{—}005262.1
   [1184] LOCUS: NP_{—}005262
   [1185] ACCESSION: NP_{—}005262
   [1186] VERSION: NP_{—}005262.1 GI:4885281
   [1187] SEQ ID NO: 84

### GTF2I

[1188] Official Symbol: GTF2I
[1189] Official Name: general transcription factor Ili
[1190] Gene ID: 2969
[1191] Organism: Homo sapiens
[1192] Other Aliases: BAP135, BTKAP1, DIWS, GTFII-I, IB291, SPIN, TFII-I, WBS, WBSCR6
[1193] Other Designations: BTK-associated protein 135; BTK-associated protein, 135 kD; Bruton tyrosine kinase-associated protein 135; SRF-Phoxl-interacting protein; Williams-Beuren syndrome chromosome region 6; general transcription factor II-I; williams-Beuren syndrome chromosomal region 6 protein
[1194] Nucleotide sequence: transcript variant 5
   [1195] NCBI Reference Sequence: NM_{—}001163636.1
   [1196] LOCUS: NM_{—}001163636
   [1197] ACCESSION: NM_{—}001163636
   [1198] VERSION: NM_{—}001163636.1 GI:254692933
   [1199] SEQ ID NO: 85
[1200] Protein sequence: isoform 5
   [1201] NCBI Reference Sequence: NP_{—}001157108.1
   [1202] LOCUS: NP_{—}001157108
   [1203] ACCESSION: NP_{—}001157108
   [1204] VERSION: NP_{—}001157108.1 GI:254692934
   [1205] SEQ ID NO: 86
[1206] Nucleotide sequence: transcript variant 4
   [1207] NCBI Reference Sequence: NM_{—}001518.3
   [1208] LOCUS: NM_{—}001518
   [1209] ACCESSION: NM_{—}001518
   [1210] VERSION: NM_{—}001518.3 GI:169881251
   [1211] SEQ ID NO: 87
[1212] Protein sequence: isoform 4
   [1213] NCBI Reference Sequence: NP_{—}001509.3
   [1214] LOCUS: NP_{—}001509
   [1215] ACCESSION: NP_{—}001509 NP_{—}127496 XP_{—}944599
   [1216] VERSION: NP_{—}001509.3 GI:169881252
   [1217] SEQ ID NO: 88
[1218] Nucleotide sequence: transcript variant 1
   [1219] NCBI Reference Sequence: NM_{—}032999.2
   [1220] LOCUS: NM_{—}032999
   [1221] ACCESSION: NM_{—}032999
   [1222] VERSION: NM_{—}032999.2 GI:169881253
   [1223] SEQ ID NO: 89
[1224] Protein sequence: isoform 1
   [1225] NCBI Reference Sequence: NP_{—}127492.1
   [1226] LOCUS: NP_{—}127492
   [1227] ACCESSION: NP_{—}127492
   [1228] VERSION: NP_{—}127492.1 GI:14670350
   [1229] SEQ ID NO: 90
[1230] Nucleotide sequence: transcript variant 2
   [1231] NCBI Reference Sequence: NM_{—}033000.2
   [1232] LOCUS: NM_{—}033000
   [1233] ACCESSION: NM_{—}033000 XM_{—}001133646
   [1234] VERSION: NM_{—}033000.2 GI:169881254
   [1235] SEQ ID NO: 91
[1236] Protein sequence: isoform 2
   [1237] NCBI Reference Sequence: NP_{—}127493.1
   [1238] LOCUS: NP_{—}127493
   [1239] ACCESSION: NP_{—}127493 XP_{—}001133646
   [1240] VERSION: NP_{—}127493.1 GI:14670352
   [1241] SEQ ID NO: 92
[1242] Nucleotide sequence: transcript variant 3
   [1243] NCBI Reference Sequence: NM_{—}033001.2
   [1244] LOCUS: NM_{—}033001
   [1245] ACCESSION: NM_{—}033001 XM_{—}001130609
   [1246] VERSION: NM_{—}033001.2 GI:1698 8 1255
   [1247] SEQ ID NO: 93
[1248] Protein sequence: isoform 3
   [1249] NCBI Reference Sequence: NP_{—}127494.1
   [1250] LOCUS: NP_{—}127494
   [1251] ACCESSION: NP_{—}127494 XP_{—}001130609
   [1252] VERSION: NP_{—}127494.1 GI:14670354
   [1253] SEQ ID NO: 94

### HBA2

[1254] Official Symbol: HBA2
[1255] Official Name: hemoglobin, alpha 2
[1256] Gene ID: 3040
[1257] Organism: Homo sapiens
[1258] Other Aliases: HBH
[1259] Other Designations: alpha globin; alpha-2 globin; alpha-globin; hemoglobin alpha chain; hemoglobin subunit alpha
[1260] Nucleotide sequence:
   [1261] NCBI Reference Sequence: NM_{—}000517.4
   [1262] LOCUS: NM_{—}000517
   [1263] ACCESSION: NM_{—}000517
   [1264] VERSION: NM_{—}000517.4 GI:172072689
   [1265] SEQ ID NO: 95
[1266] Protein sequence:
   [1267] NCBI Reference Sequence: NP_{—}000508.1
   [1268] LOCUS: NP_{—}000508
   [1269] ACCESSION: NP_{—}000508
   [1270] VERSION: NP_{—}000508.1 GI:4504345
   [1271] SEQ ID NO: 96

### HLA-A

[1272] Official Symbol: HLA-A
[1273] Official Name: major histocompatibility complex, class I, A
[1274] Gene ID: 3105
[1275] Organism: Homo sapiens
[1276] Other Aliases: DAQB-90C11.16-002, HLAA
[1277] Other Designations: HLA class I histocompatibility antigen, A-1 alpha chain; MHC class I antigen HLA-A heavy chain; antigen presenting molecule; leukocyte antigen class I-A
[1278] Nucleotide sequence: transcript variant 2
   [1279] NCBI Reference Sequence: NM_{—}001242758.1
   [1280] LOCUS: NM_{—}001242758
   [1281] ACCESSION: NM_{—}001242758 XM_{—}003960035 XM_{—}003960036 XM_{—}003960037 XM_{—}003960038 XM_{—}003960039 XM_{—}003960040 XM_{—}003960041 XM_{—}003960042 XM_{—}003960043 XM_{—}003960044 XM_{—}003960045
   [1282] VERSION: NM_{—}001242758.1 GI:337752169
   [1283] SEQ ID NO: 97
[1284] Protein sequence: A*01:01:01:01 allele
   [1285] NCBI Reference Sequence: NP_{—}001229687.1
   [1286] LOCUS: NP_{—}001229687
   [1287] ACCESSION: NP_{—}001229687 XP_{—}003960084 XP_{—}003960085 XP_{—}003960086 XP_{—}003960087 XP_{—}003960088 XP_{—}003960089 XP_{—}003960090 XP_{—}003960091 XP_{—}003960092 XP_{—}003960093 XP_{—}003960094
   [1288] VERSION: NP_{—}001229687.1 GI:337752170
   [1289] SEQ ID NO: 98
[1290] Nucleotide sequence: Transcript variant 1
   [1291] NCBI Reference Sequence: NM_{—}002116.7
   [1292] LOCUS: NM_{—}002116
   [1293] ACCESSION: NM_{—}002116 NM_{—}001080840 XM_{—}001713645
   [1294] VERSION: NM_{—}002116.7 GI:337752171
   [1295] SEQ ID NO: 99
[1296] Protein sequence: A*03:01:0:01 allele
   [1297] NCBI Reference Sequence: NP_{—}002107.3
   [1298] LOCUS: NP_{—}002107 NP_{—}001074309 XP_{—}001713697
   [1299] ACCESSION: NP_{—}002107
   [1300] VERSION: NP_{—}002107.3 GI:24797067
   [1301] SEQ ID NO: 100

### HLA-DQB1

[1302] Official Symbol: HLA-DQB 1
[1303] Official Name: major histocompatibility complex, class II, DQ beta 1
[1304] Gene ID: 3119
[1305] Organism: Homo sapiens
[1306] Other Aliases: DADB-249P12.2, CELIAC1, HLA-DQB, IDDM1
[1307] Other Designations: HLA class II histocompatibility antigen, DQ beta 1 chain; MHC DQ beta; MHC class II DQ beta chain; MHC class II HLA-DQ beta glycoprotein; MHC class II antigen DQB1; MHC class II antigen HLA-DQ-beta-1; MHC class2 antigen; lymphocyte antigen
[1308] Nucleotide sequence: transcript variant 2
   [1309] NCBI Reference Sequence: NM_{—}001243961.1
   [1310] LOCUS: NM_{—}001243961
   [1311] ACCESSION: NM_{—}001243961
   [1312] VERSION: NM_{—}001243961.1 GI:345461080
   [1313] SEQ ID NO: 101
[1314] Protein sequence: isoform 2
   [1315] NCBI Reference Sequence: NP_{—}001230890.1
   [1316] LOCUS: NP_{—}001230890
   [1317] ACCESSION: NP_{—}001230890
   [1318] VERSION: NP_{—}001230890.1 GI:345461081
   [1319] SEQ ID NO: 102
[1320] Nucleotide sequence: transcript variant 3
   [1321] NCBI Reference Sequence: NM_{—}001243962.1
   [1322] LOCUS: NM_{—}001243962
   [1323] ACCESSION: NM_{—}001243962 XM_{—}003846474 XM_{—}003846475
   [1324] VERSION: NM_{—}001243962.1 GI:345461078
   [1325] SEQ ID NO: 103
[1326] Protein sequence: isoform 1
   [1327] NCBI Reference Sequence: NP_{—}001230891.1
   [1328] LOCUS: NP_{—}001230891
   [1329] ACCESSION: NP_{—}001230891 XP_{—}003846522 XP_{—}003846523
   [1330] VERSION: NP_{—}001230891.1 GI:345461079
   [1331] SEQ ID NO: 104
[1332] Nucleotide sequence: transcript variant 1
   [1333] NCBI Reference Sequence: NM_{—}002123.4
   [1334] LOCUS: NM_{—}002123
   [1335] ACCESSION: NM_{—}002123 XM_{—}001722253 XM_{—}001723447
   [1336] VERSION: NM_{—}002123.4 GI:345461082
   [1337] SEQ ID NO: 105
[1338] Protein sequence: isoform 1
   [1339] NCBI Reference Sequence: NP_{—}002114.3
   [1340] LOCUS: NP_{—}002114
   [1341] ACCESSION: NP_{—}002114 XP_{—}001722305 XP_{—}001723499
   [1342] VERSION: NP_{—}002114.3 GI:150418002
   [1343] SEQ ID NO: 106

### HLA-DRA

[1344] Official Symbol: HLA-DRA
[1345] Official Name: major histocompatibility complex, class II, DR alpha
[1346] Gene ID: 3122
[1347] Organism: Homo sapiens
[1348] Other Aliases: DASS-397D15.1, HLA-DRA1, MLRW
[1349] Other Designations: HLA class II histocompatibility antigen, DR alpha chain; MHC cell surface glycoprotein; MHC class II antigen DRA; histocompatibility antigen HLA-DR alpha
[1350] Nucleotide sequence:
   [1351] NCBI Reference Sequence: NM_{—}019111.4
   [1352] LOCUS: NM_{—}019111
   [1353] ACCESSION: NM_{—}019111
   [1354] VERSION: NM_{—}019111.4 GI:301171411
   [1355] SEQ ID NO: 107
[1356] Protein sequence:
   [1357] NCBI Reference Sequence: NP_{—}061984.2
   [1358] LOCUS: NP_{—}061984
   [1359] ACCESSION: NP_{—}061984
   [1360] VERSION: NP_{—}061984.2 GI:52426774
   [1361] SEQ ID NO: 108

### HNRNPM

[1362] Official Symbol: HNRNPM
[1363] Official Name: heterogeneous nuclear ribonucleoprotein M
[1364] Gene ID: 4670
[1365] Organism: Homo sapiens
[1366] Other Aliases: CEAR, HNRNPM4, HNRPM, HNRPM4, HTGR1, NAGR1, hnRNP M
[1367] Other Designations: CEA receptor; N-acetylglucosamine receptor 1; heterogenous nuclear ribonucleoprotein M4; hnRNA-binding protein M4
[1368] Nucleotide sequence: transcript variant 1
   [1369] NCBI Reference Sequence: NM_{—}005968.4
   [1370] LOCUS: NM_{—}005968
   [1371] ACCESSION: NM_{—}005968
   [1372] VERSION: NM_{—}005968.4 GI:345091004
   [1373] SEQ ID NO: 109
[1374] Protein sequence: isoform a
   [1375] NCBI Reference Sequence: NP_{—}005959.2
   [1376] LOCUS: NP_{—}005959
   [1377] ACCESSION: NP_{—}005959
   [1378] VERSION: NP_{—}005959.2 GI:14141152
   [1379] SEQ ID NO: 110
[1380] Nucleotide sequence: transcript variant 2
   [1381] NCBI Reference Sequence: NM_{—}031203.3
   [1382] LOCUS: NM_{—}031203
   [1383] ACCESSION: NM_{—}031203
   [1384] VERSION: NM_{—}031203.3 GI:345091007
   [1385] SEQ ID NO: 111
[1386] Protein sequence: isoform b
   [1387] NCBI Reference Sequence: NP_{—}112480.2
   [1388] LOCUS: NP_{—}112480
   [1389] ACCESSION: NP_{—}112480
   [1390] VERSION: NP_{—}112480.2 GI:157412270
   [1391] SEQ ID NO: 112

### HPRT1

[1392] Official Symbol: HPRT1
[1393] Official Name: hypoxanthine phosphoribosyltransferase 1
[1394] Gene ID: 3251
[1395] Organism: Homo sapiens
[1396] Other Aliases: HGPRT, HPRT
[1397] Other Designations: HGPRTase; hypoxanthine-guanine phosphoribosyltransferase
[1398] Nucleotide sequence:
   [1399] NCBI Reference Sequence: NM_{—}000194.2
   [1400] LOCUS: NM_{—}000194
   [1401] ACCESSION: NM_{—}000194
   [1402] VERSION: NM_{—}000194.2 GI:164518913
   [1403] SEQ ID NO: 113
[1404] Protein sequence:
   [1405] NCBI Reference Sequence: NP_{—}000185.1
   [1406] LOCUS: NP_{—}000185
   [1407] ACCESSION: NP_{—}000185
   [1408] VERSION: NP_{—}000185.1 GI:4504483
   [1409] SEQ ID NO: 114

### HSP90B1

[1410] Official Symbol: HSP90B1
[1411] Official Name: heat shock protein 90 kDa beta (Grp94), member 1
[1412] Gene ID: 7184
[1413] Organism: Homo sapiens
[1414] Other Aliases: ECGP, GP96, GRP94, TRA1
[1415] Other Designations: 94 kDa glucose-regulated protein; endoplasmin; endothelial cell (HBMEC) glycoprotein; heat shock protein 90 kDa beta member 1; stress-inducible tumor rejection antigen gp96; tumor rejection antigen (gp96) 1; tumor rejection antigen 1
[1416] Nucleotide sequence:
   [1417] NCBI Reference Sequence: NM_{—}003299.2
   [1418] LOCUS: NM_{—}003299
   [1419] ACCESSION: NM_{—}003299
   [1420] VERSION: NM_{—}003299.2 GI:399567818
   [1421] SEQ ID NO: 115
[1422] Protein sequence:
   [1423] NCBI Reference Sequence: NP_{—}003290.1
   [1424] LOCUS: NP_{—}003290
   [1425] ACCESSION: NP_{—}003290
   [1426] VERSION: NP_{—}003290.1 GI:4507677
   [1427] SEQ ID NO: 116

### HSPH1

[1428] Official Symbol: HSPH1
[1429] Official Name: heat shock 105 kDa/110 kDa protein 1
[1430] Gene ID: 10808
[1431] Organism: Homo sapiens
[1432] Other Aliases: RP11-173P16.1, HSP105, HSP105A, HSP105B, NY-CO-25
[1433] Other Designations: antigen NY-CO-25; heat shock 105 kD alpha; heat shock 105 kD beta; heat shock 105 kDa protein 1; heat shock 110 kDa protein; heat shock protein 105 kDa
[1434] Nucleotide sequence:
   [1435] NCBI Reference Sequence: NM_{—}006644.2
   [1436] LOCUS: NM_{—}006644
   [1437] ACCESSION: NM_{—}006644
   [1438] VERSION: NM_{—}006644.2 GI:42544158
   [1439] SEQ ID NO: 117
[1440] Protein sequence:
   [1441] NCBI Reference Sequence: NP_{—}006635.2
   [1442] LOCUS: NP_{—}006635
   [1443] ACCESSION: NP_{—}006635
   [1444] VERSION: NP_{—}006635.2 GI:42544159
   [1445] SEQ ID NO: 118

### IGHM

[1446] Official Symbol: IGHM
[1447] Official Name: immunoglobulin heavy constant mu
[1448] Gene ID: 3507
[1449] Organism: Homo sapiens
[1450] Other Aliases: AGM1, MU, VH
[1451] Other Designations: none
[1452] Nucleotide sequence: mRNA variant 1
   [1453] ENA Sequence Reference No: X17115.1
   [1454] >ENA|X17115|X17115.1 Human mRNA for IgM heavy chain complete sequence: Location:1 . . . 1000
   [1455] SEQ ID NO: 119
[1456] Protein sequence: isoform 1
   [1457] UniProtKB/Swiss-Prot Reference No.: P01871-1
   [1458] >sp|P01871|IGHM_HUMAN Ig mu chain C region OS=Homo sapiens GN=IGHM PE=1 SV=3
   [1459] SEQ ID NO: 120
[1460] Nucleotide sequence: mRNA variant 2
   [1461] ENA Sequence Reference No: X57086.1
   [1462] >ENA|X57086|X57086.1 H.sapiens mRNA for IgM heavy chain constant domain: Location:1 . . . 1000
   [1463] SEQ ID NO: 121
[1464] Protein sequence: isoform 2
   [1465] UniProtKB/Swiss-Prot Reference No.: P01871-2
   [1466] >sp|P01871-2|IGHM_HUMAN Isoform 2 of Ig mu chain C region OS=Homo sapiens: GN=IGHM
   [1467] SEQ ID NO: 122

### IGLC1

[1468] Official Symbol: IGLC1
[1469] Official Name: immunoglobulin lambda constant 1 (Mcg marker)
[1470] Gene ID: 3537
[1471] Organism: Homo sapiens
[1472] Other Aliases: IGLC
[1473] Other Designations: none
[1474] Nucleotide sequence: mRNA variant 1
   [1475] ENA Sequence Reference No: CAA36047.1
   [1476] >ENA|CAA36047|CAA36047.1 Homo sapiens (human) hypothetical protein: Location: 1 . . . 320
   [1477] SEQ ID NO: 123
[1478] Nucleotide sequence: mRNA variant 2
   [1479] ENA Sequence Reference No: AAA59106.1
   [1480] >ENA|AAA59106|AAA59106.1 Homo sapiens (human) partial immunoglobulin lambda light chain C region: Location: 1 . . . 315
   [1481] SEQ ID NO: 124
[1482] Protein sequence:
   [1483] UniProtKB/Swiss-Prot Reference No.: P0CG04
   [1484] >sp|P0CG04|LAC1_HUMAN Ig lambda-1 chain C regions OS=Homo sapiens GN=IGLC1 PE=1 SV=1
   [1485] SEQ ID NO: 125

### ITGB7

[1486] Official Symbol: ITGB7
[1487] Official Name: integrin, beta 7
[1488] Gene ID: 3695
[1489] Organism: Homo sapiens
[1490] Other Aliases: none
[1491] Other Designations: gut homing receptor beta subunit; integrin beta 7 subunit; integrin beta-7
[1492] Nucleotide sequence:
   [1493] NCBI Reference Sequence: NM_{—}000889.1
   [1494] LOCUS: NM_{—}000889
   [1495] ACCESSION: NM_{—}000889
   [1496] VERSION: NM_{—}000889.1 GI:4504776
   [1497] SEQ ID NO: 126
[1498] Protein sequence:
   [1499] NCBI Reference Sequence: NP_{—}000880.1
   [1500] LOCUS: NP_{—}000880
   [1501] ACCESSION: NP_{—}000880
   [1502] VERSION: NP_{—}000880.1 GI:4504777
   [1503] SEQ ID NO: 127

### LCP1

[1504] Official Symbol: LCP1
[1505] Official Name: lymphocyte cytosolic protein 1 (L-plastin)
[1506] Gene ID: 3936
[1507] Organism: Homo sapiens
[1508] Other Aliases: RP11-139H14.1, CP64, L-PLASTIN, LC64P, LPL, PLS2
[1509] Other Designations: L-plastin (Lymphocyte cytosolic protein 1) (LCP-1) (LC64P); LCP-1; Lymphocyte cytosolic protein-1 (plasmin); bA139H14.1 (lymphocyte cytosolic protein 1 (L-plastin)); plastin 2; plastin-2
[1510] Nucleotide sequence:
   [1511] NCBI Reference Sequence: NM_{—}002298.4
   [1512] LOCUS: NM_{—}002298
   [1513] ACCESSION: NM_{—}002298
   [1514] VERSION: NM_{—}002298.4 GI:195546923
   [1515] SEQ ID NO: 128
[1516] Protein sequence:
   [1517] NCBI Reference Sequence: NP_{—}002289.2
   [1518] LOCUS: NP_{—}002289
   [1519] ACCESSION: NP_{—}002289
   [1520] VERSION: NP_{—}002289.2 GI:167614506
   [1521] SEQ ID NO: 129

### LETM1

[1522] Official Symbol: LETM1
[1523] Official Name: leucine zipper-EF-hand containing transmembrane protein 1
[1524] Gene ID: 3954
[1525] Organism: Homo sapiens
[1526] Other Aliases: none
[1527] Other Designations: LETM1 and EF-hand domain-containing protein 1, mitochondrial; Mdm38 homolog; leucine zipper-EF-hand-containing transmembrane protein 1
[1528] Nucleotide sequence:
   [1529] NCBI Reference Sequence: NM_{—}012318.2
   [1530] LOCUS: NM_{—}012318
   [1531] ACCESSION: NM_{—}012318
   [1532] VERSION: NM_{—}012318.2 GI:194595498
   [1533] SEQ ID NO: 130
[1534] Protein sequence:
   [1535] NCBI Reference Sequence: NP_{—}036450.1
   [1536] LOCUS: NP_{—}036450
   [1537] ACCESSION: NP_{—}036450
   [1538] VERSION: NP_{—}036450.1 GI:6912482
   [1539] SEQ ID NO: 131

### LMNA

[1540] Official Symbol: LMNA
[1541] Official Name: lamin A/C
[1542] Gene ID: 150330
[1543] Organism: Homo sapiens
[1544] Other Aliases: RP11-54H19.1, CDCD1, CDDC, CMD1A, CMT2B1, EMD2, FPL, FPLD, FPLD2, HGPS, IDC, LDP1, LFP, LGMD1B, LMN1, LMNC, LMNL1, PRO1
[1545] Other Designations: 70 kDa lamin; lamin; lamin A/C-like 1; prelamin-A/C; renal carcinoma antigen NY-REN-32
[1546] Nucleotide sequence: transcript variant 4
   [1547] NCBI Reference Sequence: NM_{—}001257374.1
   [1548] LOCUS: NM_{—}001257374
   [1549] ACCESSION: NM_{—}001257374
   [1550] VERSION: NM_{—}001257374.1 GI:383792149
   [1551] SEQ ID NO: 132
[1552] Protein sequence: isoform D
   [1553] NCBI Reference Sequence: NP_{—}001244303.1
   [1554] LOCUS: NP_{—}001244303
   [1555] ACCESSION: NP_{—}001244303
   [1556] VERSION: NP_{—}001244303.1 GI:383792150
   [1557] SEQ ID NO: 133
[1558] Nucleotide sequence: transcript variant 2
   [1559] NCBI Reference Sequence: NM_{—}005572.3
   [1560] LOCUS: NM_{—}005572
   [1561] ACCESSION: NM_{—}005572
   [1562] VERSION: NM_{—}005572.3 GI:153281091
   [1563] SEQ ID NO: 134
[1564] Protein sequence: isoform C
   [1565] NCBI Reference Sequence: NP_{—}005563.1
   [1566] LOCUS: NP_{—}005563
   [1567] ACCESSION: NP_{—}005563
   [1568] VERSION: NP_{—}005563.1 GI:5031875
   [1569] SEQ ID NO: 135
[1570] Nucleotide sequence: transcript variant 1
   [1571] NCBI Reference Sequence: NM_{—}170707.3
   [1572] LOCUS: M_{—}170707
   [1573] ACCESSION: NM_{—}170707
   [1574] VERSION: NM_{—}170707.3 GI:383792147
   [1575] SEQ ID NO: 136
[1576] Protein sequence: isoform A
   [1577] NCBI Reference Sequence: NP_{—}733821.1
   [1578] LOCUS: NP_{—}733821
   [1579] ACCESSION: NP_{—}733821
   [1580] VERSION: NP_{—}733821.1 GI:27436946
   [1581] SEQ ID NO: 137
[1582] Nucleotide sequence: transcript variant 3
   [1583] NCBI Reference Sequence: NM_{—}170708.3
   [1584] LOCUS: NM_{—}170708
   [1585] ACCESSION: NM_{—}170708
   [1586] VERSION: NM_{—}170708.3 GI:383792148
   [1587] SEQ ID NO: 138
[1588] Protein sequence: isoform A-delta10
   [1589] NCBI Reference Sequence: NP_{—}733822.1
   [1590] LOCUS: NP_{—}733822
   [1591] ACCESSION: NP_{—}733822
   [1592] VERSION: NP_{—}733822.1 GI:27436948
   [1593] SEQ ID NO: 139

### MGEA5

[1594] Official Symbol: MGEA5
[1595] Official Name: meningioma expressed antigen 5 (hyaluronidase)
[1596] Gene ID: 10724
[1597] Organism: Homo sapiens
[1598] Other Aliases: MEA5, NCOAT, OGA
[1599] Other Designations: O-G1cNAcase; bifunctional protein NCOAT; hyaluronidase in meningioma; meningioma-expressed antigen 5; nuclear cytoplasmic O-G1cNAcase and acetyltransferase
[1600] Nucleotide sequence: transcript variant 2
   [1601] NCBI Reference Sequence: NM_{—}001142434.1
   [1602] LOCUS: NM_{—}001142434
   [1603] ACCESSION: NM_{—}001142434
   [1604] VERSION: NM_{—}001142434.1 GI:215490055
   [1605] SEQ ID NO: 140
[1606] Protein sequence: isoform b
   [1607] NCBI Reference Sequence: NP_{—}001135906.1
   [1608] LOCUS: NP_{—}001135906
   [1609] ACCESSION: NP_{—}001135906
   [1610] VERSION: NP_{—}001135906.1 GI:215490056
   [1611] SEQ ID NO: 141
[1612] Nucleotide sequence: transcript variant 1
   [1613] NCBI Reference Sequence: NM_{—}012215.3
   [1614] LOCUS: NM_{—}012215
   [1615] ACCESSION: NM_{—}012215
   [1616] VERSION: NM_{—}012215.3 GI:215490054
   [1617] SEQ ID NO: 142
[1618] Protein sequence: isoform a
   [1619] NCBI Reference Sequence: NP_{—}036347.1
   [1620] LOCUS: NP_{—}036347
   [1621] ACCESSION: NP_{—}036347
   [1622] VERSION: NP_{—}036347.1 GI:11024698
   [1623] SEQ ID NO: 143

### MTHFD1

[1624] Official Symbol: MTHFD1
[1625] Official Name: methylenetetrahydrofolate dehydrogenase (NADP+ dependent) 1, methenyltetrahydrofolate cyclohydrolase, formyltetrahydrofolate synthetase
[1626] Gene ID: 4522
[1627] Organism: Homo sapiens
[1628] Other Aliases: MTHFC, MTHFD
[1629] Other Designations: 5,10-methylenetetrahydrofolate dehydrogenase, 5,10-methylenetetrahydrofolate cyclohydrolase, 10-formyltetrahydrofolate synthetase; C-1-tetrahydrofolate synthase, cytoplasmic; C1-THF synthase; cytoplasmic C-1-tetrahydrofolate synthase
[1630] Nucleotide sequence:
   [1631] NCBI Reference Sequence: NM_{—}005956.3
   [1632] LOCUS: NM_{—}005956
   [1633] ACCESSION: NM_{—}005956
   [1634] VERSION: NM_{—}005956.3 GI:222136638
   [1635] SEQ ID NO: 144
[1636] Protein sequence:
   [1637] NCBI Reference Sequence: NP_{—}005947.3
   [1638] LOCUS: NP_{—}005947
   [1639] ACCESSION: NP_{—}005947
   [1640] VERSION: NP_{—}005947.3 GI:222136639
   [1641] SEQ ID NO: 145

### MX1

[1642] Official Symbol: MX1
[1643] Official Name: myxovirus (influenza virus) resistance 1, interferon-inducible protein
[1644] p78 (mouse)
[1645] Gene ID: 4599
[1646] Organism: Homo sapiens
[1647] Other Aliases: IFI-78K, IF178, MX, MxA
[1648] Other Designations: interferon-induced GTP-binding protein Mx1; interferon-regulated resistance GTP-binding protein MxA; myxoma resistance protein 1
[1649] Nucleotide sequence: transcript variant 1
   [1650] NCBI Reference Sequence: NM_{—}001144925.1
   [1651] LOCUS: NM_{—}001144925
   [1652] ACCESSION: NM_{—}001144925
   [1653] VERSION: NM_{—}001144925.1 GI:222136618
   [1654] SEQ ID NO: 146
[1655] Protein sequence: all variants encode the same protein
   [1656] NCBI Reference Sequence: NP_{—}001138397.1
   [1657] LOCUS: NP_{—}001138397
   [1658] ACCESSION: NP_{—}001138397
   [1659] VERSION: NP_{—}001138397.1 GI:222136619
   [1660] SEQ ID NO: 147
[1661] Nucleotide sequence: transcript variant 3
   [1662] NCBI Reference Sequence: NM_{—}001178046.1
   [1663] LOCUS: NM_{—}001178046
   [1664] ACCESSION: NM_{—}001178046
   [1665] VERSION: NM_{—}001178046.1 GI:295842577
   [1666] SEQ ID NO: 148
[1667] protein sequence: all variants encode the same protein
   [1668] NCBI Reference Sequence: NP_{—}001171517.1
   [1669] LOCUS: NP_{—}001171517
   [1670] ACCESSION: NP_{—}001171517
   [1671] VERSION: NP_{—}001171517.1 GI:295842578
   [1672] SEQ ID NO: 149
[1673] Nucleotide sequence: transcript variant 2
   [1674] NCBI Reference Sequence: NM_{—}002462.3
   [1675] LOCUS: NM_{—}002462
   [1676] ACCESSION: NM_{—}002462
   [1677] VERSION: NM_{—}002462.3 GI:222136616
   [1678] SEQ ID NO: 150
[1679] Protein sequence: all variants encode the same protein
   [1680] NCBI Reference Sequence: NP_{—}002453.2
   [1681] LOCUS: NP_{—}002453
   [1682] ACCESSION: NP_{—}002453
   [1683] VERSION: NP_{—}002453.2 GI:222136617
   [1684] SEQ ID NO: 151

### OSBP

[1685] Official Symbol: OSBP
[1686] Official Name: oxysterol binding protein
[1687] Gene ID: 5007
[1688] Organism: Homo sapiens
[1689] Other Aliases: OSBP1
[1690] Other Designations: oxysterol-binding protein 1
[1691] Nucleotide sequence:
   [1692] NCBI Reference Sequence: NM_{—}002556.2
   [1693] LOCUS: NM_{—}002556
   [1694] ACCESSION: NM_{—}002556
   [1695] VERSION: NM_{—}002556.2 GI:34485728
   [1696] SEQ ID NO: 152
[1697] Protein sequence:
   [1698] NCBI Reference Sequence: NP_{—}002547.1
   [1699] LOCUS: NP_{—}002547
   [1700] ACCESSION: NP_{—}002547
   [1701] VERSION: NP_{—}002547.1 GI:4505531
   [1702] SEQ ID NO: 153

### P4HB

[1703] Official Symbol: P4HB
[1704] Official Name: prolyl 4-hydroxylase, beta polypeptide
[1705] Gene ID: 5034
[1706] Organism: Homo sapiens
[1707] Other Aliases: DSI, ERBA2L, GIT, P4Hbeta, PDI, PDIA1, PHDB, PO4DB, PO4HB, PROHB
[1708] Other Designations: cellular thyroid hormone-binding protein; collagen prolyl 4-hydroxylase beta; glutathione-insulin transhydrogenase; p55; procollagen-proline, 2-oxoglutarate 4-dioxygenase (proline 4-hydroxylase), beta polypeptide; prolyl 4-hydroxylase subunit beta; protein disulfide isomerase family A, member 1; protein disulfide isomerase-associated 1; protein disulfide isomerase/oxidoreductase; protein disulfide-isomerase; protocollagen hydroxylase; thyroid hormone-binding protein p55
[1709] Nucleotide sequence:
   [1710] NCBI Reference Sequence: NM_{—}000918.3
   [1711] LOCUS: NM_{—}000918
   [1712] ACCESSION: NM_{—}000918
   [1713] VERSION: NM_{—}000918.3 GI:121256637
   [1714] SEQ ID NO: 154
[1715] Protein sequence:
   [1716] NCBI Reference Sequence: NP_{—}000909.2
   [1717] LOCUS: NP_{—}000909
   [1718] ACCESSION: NP_{—}000909
   [1719] VERSION: NP_{—}000909.2 GI:20070125
   [1720] SEQ ID NO: 155

### PCNA

[1721] Official Symbol: PCNA
[1722] Official Name: proliferating cell nuclear antigen
[1723] Gene ID: 5111
[1724] Organism: Homo sapiens
[1725] Other Aliases: none
[1726] Other Designations: DNA polymerase delta auxiliary protein; cyclin
[1727] Nucleotide sequence: transcript variant 1
   [1728] NCBI Reference Sequence: NM_{—}002592.2
   [1729] LOCUS: NM_{—}002592
   [1730] ACCESSION: NM_{—}002592
   [1731] VERSION: NM_{—}002592.2 GI:33239449
   [1732] SEQ ID NO: 156
[1733] Protein sequence: both variants encode the same protein
   [1734] NCBI Reference Sequence: NP_{—}002583.1
   [1735] LOCUS: NP_{—}002583
   [1736] ACCESSION: NP_{—}002583
   [1737] VERSION: NP_{—}002583.1 GI:4505641
   [1738] SEQ ID NO: 157
[1739] Nucleotide sequence: transcript variant 2
   [1740] NCBI Reference Sequence: NM_{—}182649.1
   [1741] LOCUS: NM_{—}182649
   [1742] ACCESSION: NM_{—}182649
   [1743] VERSION: NM_{—}182649.1 GI:33239450
   [1744] SEQ ID NO: 158
[1745] Protein sequence: both variants encode the same protein
   [1746] NCBI Reference Sequence: NP_{—}872590.1
   [1747] LOCUS: NP_{—}872590
   [1748] ACCESSION: NP_{—}872590
   [1749] VERSION: NP_{—}872590.1 GI:33239451
   [1750] SEQ ID NO: 159

### PDCL3

[1751] Official Symbol: PDCL3
[1752] Official Name: phosducin-like 3
[1753] Gene ID: 79031
[1754] Organism: Homo sapiens
[1755] Other Aliases: HTPHLP, PHLP2A, PHLP3, VIAF, VIAF1
[1756] Other Designations: IAP-associated factor VIAF1; VIAF-1; phPL3; phosducin-like protein 3; viral IAP-associated factor 1
[1757] Nucleotide sequence:
   [1758] NCBI Reference Sequence: NM_{—}024065.4
   [1759] LOCUS: NM_{—}024065
   [1760] ACCESSION: NM_{—}024065
   [1761] VERSION: NM_{—}024065.4 GI: 163310761
   [1762] SEQ ID NO: 160
[1763] Protein sequence:
   [1764] NCBI Reference Sequence: NP_{—}076970.1
   [1765] LOCUS NP_{—}076970
   [1766] ACCESSION NP_{—}076970
   [1767] VERSION: NP_{—}076970.1 GI:13129044
   [1768] SEQ ID NO: 161

### PDIA4

[1769] Official Symbol: PDIA4
[1770] Official Name: protein disulfide isomerase family A, member 4
[1771] Gene ID: 9601
[1772] Organism: Homo sapiens
[1773] Other Aliases: ERP70, ERP72, ERp-72
[1774] Other Designations: ER protein 70; ER protein 72; endoplasmic reticulum resident protein 70; endoplasmic reticulum resident protein 72; protein disulfide isomerase related protein (calcium-binding protein, intestinal-related); protein disulfide isomerase-associated 4; protein disulfide-isomerase A4
[1775] Nucleotide sequence:
   [1776] NCBI Reference Sequence: NM_{—}004911.4
   [1777] LOCUS: NM_{—}004911
   [1778] ACCESSION: NM_{—}004911
   [1779] VERSION: NM_{—}004911.4 GI:157427676
   [1780] SEQ ID NO: 162
[1781] Protein sequence:
   [1782] NCBI Reference Sequence: NP_{—}004902.1
   [1783] LOCUS NP_{—}004902
   [1784] ACCESSION NP_{—}004902
   [1785] VERSION: NP_{—}004902.1 GI:4758304
   [1786] SEQ ID NO: 163

### PEA15

[1787] Official Symbol: EA15
[1788] Official Name: phosphoprotein enriched in astrocytes 15
[1789] Gene ID: 8682
[1790] Organism: Homo sapiens
[1791] Other Aliases: RP11-536C5.8, HMAT1, HUMMAT1H, MAT1, MAT1H, PEA-15, PED
[1792] Other Designations: 15 kDa phosphoprotein enriched in astrocytes; Phosphoprotein enriched in astrocytes, 15kD; astrocytic phosphoprotein PEA-15; homolog of mouse MAT-1 oncogene; phosphoprotein enriched in diabetes
[1793] Nucleotide sequence:
   [1794] NCBI Reference Sequence: NM_{—}003768.3
   [1795] LOCUS: NM_{—}003768
   [1796] ACCESSION: NM_{—}003768 NM_{—}013287
   [1797] VERSION: NM_{—}003768.3 GI:208431812
   [1798] SEQ ID NO: 164
[1799] Protein sequence:
   [1800] NCBI Reference Sequence: NP_{—}003759.1
   [1801] LOCUS NP_{—}003759
   [1802] ACCESSION NP_{—}003759 NP_{—}037419
   [1803] VERSION: NP_{—}003759.1 GI:4505705
   [1804] SEQ ID NO: 165

### PSMA2

[1805] Official Symbol: PSMA2
[1806] Official Name: proteasome (prosome, macropain) subunit, alpha type, 2
[1807] Gene ID: 5683
[1808] Organism: Homo sapiens
[1809] Other Aliases: HC3, MU, PMSA2, PSC2
[1810] Other Designations: macropain subunit C3; multicatalytic endopeptidase complex subunit C3; proteasome component C3; proteasome subunit HC3; proteasome subunit alpha type-2
[1811] Nucleotide sequence:
   [1812] NCBI Reference Sequence: NM_{—}002787.4
   [1813] LOCUS: NM_{—}002787
   [1814] ACCESSION: NM_{—}002787
   [1815] VERSION: NM_{—}002787.4 GI:156071494
   [1816] SEQ ID NO: 166
[1817] Protein sequence:
   [1818] NCBI Reference Sequence: NP_{—}002778.1
   [1819] LOCUS NP_{—}002778
   [1820] ACCESSION NP_{—}002778
   [1821] VERSION: NP_{—}002778.1 GI:4506181
   [1822] SEQ ID NO: 167

[1823] PSME1
[1824] Official Symbol: PSME1
[1825] Official Name: proteasome (prosome, macropain) activator subunit 1 (PA28 alpha)
[1826] Gene ID: 5720
[1827] Organism: Homo sapiens
[1828] Other Aliases: IF15111, PA28A, PA28alpha, REGalpha
[1829] Other Designations: 11S regulator complex alpha subunit; 11S regulator complex subunit alpha; 29-kD MCP activator subunit; IGUP 1-5111; REG-alpha; activator of multicatalytic protease subunit 1; interferon gamma up-regulated I-5111 protein; interferon-gamma IEF SSP 5111; interferon-gamma-inducible protein 5111; proteasome activator 28 subunit alpha; proteasome activator complex subunit 1; proteasome activator subunit-1
[1830] Nucleotide sequence: transcript variant 1
   [1831] NCBI Reference Sequence: NM_{—}006263.2
   [1832] LOCUS: NM_{—}006263
   [1833] ACCESSION: NM_{—}006263
   [1834] VERSION: NM_{—}006263.2 GI:30581139
   [1835] SEQ ID NO: 168
[1836] Protein sequence: isoform 1
   [1837] NCBI Reference Sequence: NP_{—}006254.1
   [1838] LOCUS NP_{—}006254
   [1839] ACCESSION NP_{—}006254
   [1840] VERSION: NP_{—}006254.1 GI:5453990
   [1841] SEQ ID NO: 169
[1842] Nucleotide sequence: transcript variant 2
   [1843] NCBI Reference Sequence: NM_{—}176783.1
   [1844] LOCUS: NM_{—}176783
   [1845] ACCESSION: NM_{—}176783
   [1846] VERSION: NM_{—}176783.1 GI:30581140
   [1847] SEQ ID NO: 170
[1848] Protein sequence: isoform 2
   [1849] NCBI Reference Sequence: NP_{—}788955.1
   [1850] LOCUS NP_{—}788955
   [1851] ACCESSION NP_{—}788955
   [1852] VERSION: NP_{—}788955.1 GI:30581141
   [1853] SEQ ID NO: 171

### PDIA4

[1854] Official Symbol: RPL13
[1855] Official Name: ribosomal protein L13
[1856] Gene ID: 6137
[1857] Organism: Homo sapiens
[1858] Other Aliases: OK/SW-c1.46, BBC1, D16S444E, D16S44E, L13
[1859] Other Designations: 60S ribosomal protein L13; OK/SW-c1.46; breast basic conserved protein 1
[1860] Nucleotide sequence: transcript variant 1
   [1861] NCBI Reference Sequence: NM_{—}000977.3
   [1862] LOCUS: NM_{—}000977
   [1863] ACCESSION: NM_{—}000977
   [1864] VERSION: NM_{—}000977.3 GI:341604764
   [1865] SEQ ID NO: 172
[1866] Protein sequence: isoform 1
   [1867] NCBI Reference Sequence: NP_{—}000968.2
   [1868] LOCUS NP_{—}000968
   [1869] ACCESSION NP_{—}000968
   [1870] VERSION: NP_{—}000968.2 GI:15431297
   [1871] SEQ ID NO: 173
[1872] Nucleotide sequence: transcript variant 3
   [1873] NCBI Reference Sequence: NM_{—}001243130.1
   [1874] LOCUS: NM_{—}001243130
   [1875] ACCESSION: NM_{—}001243130
   [1876] VERSION: NM_{—}001243130.1 GI:341604767
   [1877] SEQ ID NO: 174
[1878] Protein sequence: isoform 2
   [1879] NCBI Reference Sequence: NP_{—}001230059.1
   [1880] LOCUS NP_{—}001230059
   [1881] ACCESSION NP_{—}001230059
   [1882] VERSION: NP_{—}001230059.1 GI:341604768
   [1883] SEQ ID NO: 175
[1884] Nucleotide sequence: transcript variant 4
   [1885] NCBI Reference Sequence: NM_{—}001243131.1
   [1886] LOCUS: NM_{—}001243131
   [1887] ACCESSION: NM_{—}001243131
   [1888] VERSION: NM_{—}001243131.1 GI:341604769
   [1889] SEQ ID NO: 176
[1890] Protein sequence: isoform 3
   [1891] NCBI Reference Sequence: NP_{—}001230060.1
   [1892] LOCUS NP_{—}001230060
   [1893] ACCESSION NP_{—}001230060
   [1894] VERSION: NP_{—}001230060.1 GI:341604770
   [1895] SEQ ID NO: 177
[1896] Nucleotide sequence: transcript variant 2
   [1897] NCBI Reference Sequence: NM_{—}033251.2
   [1898] LOCUS: NM_{—}033251
   [1899] ACCESSION: NM_{—}033251
   [1900] VERSION: NM_{—}033251.2 GI:341604766
   [1901] SEQ ID NO: 178
[1902] Protein sequence: isoform 1
   [1903] NCBI Reference Sequence: NP_{—}150254.1
   [1904] LOCUS NP_{—}150254
   [1905] ACCESSION NP_{—}150254
   [1906] VERSION: NP_{—}150254.1 GI:15431295
   [1907] SEQ ID NO: 179

### RPS15

[1908] Official Symbol: RPS15
[1909] Official Name: ribosomal protein S15
[1910] Gene ID: 6209
[1911] Organism: Homo sapiens
[1912] Other Aliases: RIG, S15
[1913] Other Designations: 40S ribosomal protein S15; homolog of rat insulinoma; insulinoma protein
[1914] Nucleotide sequence:
   [1915] NCBI Reference Sequence: NM_{—}001018.3
   [1916] LOCUS: NM_{—}001018
   [1917] ACCESSION: NM_{—}001018 NM_{—}001080831
   [1918] VERSION: NM_{—}001018.3 GI:71284430
   [1919] SEQ ID NO: 180
[1920] Protein sequence:
   [1921] NCBI Reference Sequence: NP_{—}001009.1
   [1922] LOCUS NP_{—}001009
   [1923] ACCESSION NP_{—}001009 NP_{—}001074300
   [1924] VERSION: NP_{—}001009.1 GI:4506687
   [1925] SEQ ID NO: 181

### SEC61A1

[1926] Official Symbol: SEC61A1
[1927] Official Name: Sec61 alpha 1 subunit (S. cerevisiae)
[1928] Gene ID: 29927
[1929] Organism: Homo sapiens
[1930] Other Aliases: HSEC61, SEC61, SEC61A
[1931] Other Designations: Sec61 alpha-1; protein transport protein SEC61 alpha subunit; protein transport protein Sec61 subunit alpha; protein transport protein Sec61 subunit alpha isoform 1; sec61 homolog
[1932] Nucleotide sequence:
   [1933] NCBI Reference Sequence: NM_{—}013336.3
   [1934] LOCUS: NM_{—}013336
   [1935] ACCESSION: NM_{—}013336 NM_{—}015968
   [1936] VERSION: NM_{—}013336.3 GI:60218911
   [1937] SEQ ID NO: 182
[1938] Protein sequence:
   [1939] NCBI Reference Sequence: NP_{—}037468.1
   [1940] LOCUS NP_{—}037468
   [1941] ACCESSION NP_{—}037468 NP_{—}057052
   [1942] VERSION: NP_{—}037468.1 GI:7019415
   [1943] SEQ ID NO: 183

### SEPT2

[1944] Official Symbol: SEPT2
[1945] Official Name: septin 2
[1946] Gene ID: 4735
[1947] Organism: Homo sapiens
[1948] Other Aliases: DIFF6, NEDD5, Pnut13, hNedd5
[1949] Other Designations: NEDD-5; neural precursor cell expressed developmentally down-regulated protein 5; neural precursor cell expressed, developmentally down-regulated 5; septin-2
[1950] Nucleotide sequence: transcript variant 1
   [1951] NCBI Reference Sequence: NM_{—}001008491.1
   [1952] LOCUS: NM_{—}001008491
   [1953] ACCESSION: NM_{—}001008491
   [1954] VERSION: NM_{—}001008491.1 GI:56549635
   [1955] SEQ ID NO: 184
[1956] Protein sequence:
   [1957] NCBI Reference Sequence: NP_{—}001008491.1
   [1958] LOCUS NP_{—}001008491
   [1959] ACCESSION NP_{—}001008491
   [1960] VERSION: NP_{—}001008491.1 GI:56549636
   [1961] SEQ ID NO: 185
[1962] Nucleotide sequence: transcript variant 3
   [1963] NCBI Reference Sequence: NM_{—}001008492.1
   [1964] LOCUS: NM_{—}001008492
   [1965] ACCESSION: NM_{—}001008492
   [1966] VERSION: NM_{—}001008492.1 GI:56549637
   [1967] SEQ ID NO: 186
[1968] Protein sequence:
   [1969] NCBI Reference Sequence: NP_{—}001008492.1
   [1970] LOCUS NP_{—}001008492
   [1971] ACCESSION NP_{—}001008492
   [1972] VERSION: NP_{—}001008492.1 GI:56549638
   [1973] SEQ ID NO: 187
[1974] Nucleotide sequence: transcript variant 4
   [1975] NCBI Reference Sequence: NM_{—}004404.3
   [1976] LOCUS: NM_{—}004404
   [1977] ACCESSION: NM_{—}004404
   [1978] VERSION: NM_{—}004404.3 GI:56550108
   [1979] SEQ ID NO: 188
[1980] Protein sequence:
   [1981] NCBI Reference Sequence: NP_{—}004395.1
   [1982] LOCUS NP_{—}004395
   [1983] ACCESSION NP_{—}004395
   [1984] VERSION: NP_{—}004395.1 GI:4758158
   [1985] SEQ ID NO: 189
[1986] Nucleotide sequence: transcript variant 2
   [1987] NCBI Reference Sequence: NM_{—}006155.1
   [1988] LOCUS: NM_{—}006155
   [1989] ACCESSION: NM_{—}006155
   [1990] VERSION: NM_{—}006155.1 GI:56549639
   [1991] SEQ ID NO: 190
[1992] Protein sequence:
   [1993] NCBI Reference Sequence: NP_{—}006146.1
   [1994] LOCUS NP_{—}006146
   [1995] ACCESSION NP_{—}006146
   [1996] VERSION: NP_{—}006146.1 GI:56549640
   [1997] SEQ ID NO: 191

### SERPINB9

[1998] Official Symbol: SERPINB9
[1999] Official Name: serpin peptidase inhibitor, clade B (ovalbumin), member 9
[2000] Gene ID: 5272
[2001] Organism: Homo sapiens
[2002] Other Aliases: CAP-3, CAP3, PI-9, PI9
[2003] Other Designations: cytoplasmic antiproteinase 3; peptidase inhibitor 9; protease inhibitor 9 (ovalbumin type); serine (or cysteine) proteinase inhibitor, clade B (ovalbumin), member 9; serpin B9; serpin peptidase inhibitor, clade B, member 9
[2004] Nucleotide sequence:
   [2005] NCBI Reference Sequence: NM_{—}004155.5
   [2006] LOCUS: NM_{—}004155
   [2007] ACCESSION: NM_{—}004155
   [2008] VERSION: NM_{—}004155.5 GI:380254460
   [2009] SEQ ID NO: 192
[2010] Protein sequence:
   [2011] NCBI Reference Sequence: NP_{—}004146.1
   [2012] LOCUS NP_{—}004146
   [2013] ACCESSION NP_{—}004146
   [2014] VERSION: NP_{—}004146.1 GI:4758906
   [2015] SEQ ID NO: 193

### SMC4

[2016] Official Symbol: SMC4
[2017] Official Name: structural maintenance of chromosomes 4
[2018] Gene ID: 10051
[2019] Organism: Homo sapiens
[2020] Other Aliases: CAP-C, CAPC, SMC-4, SMC4L1, hCAP-C
[2021] Other Designations: SMC protein 4; SMC4 structural maintenance of chromosomes 4-like 1; XCAP-C homolog; chromosome-associated polypeptide C; structural maintenance of chromosomes protein 4
[2022] Nucleotide sequence: transcript variant 2
   [2023] NCBI Reference Sequence: NM_{—}001002800.1
   [2024] LOCUS: NM_{—}001002800
   [2025] ACCESSION: NM_{—}001002800
   [2026] VERSION: NM_{—}001002800.1 GI:50658062
   [2027] SEQ ID NO: 194
[2028] Protein sequence:
   [2029] NCBI Reference Sequence: NP_{—}001002800.1
   [2030] LOCUS NP_{—}001002800
   [2031] ACCESSION NP_{—}001002800
   [2032] VERSION: NP_{—}001002800.1 GI:50658063
   [2033] SEQ ID NO: 195
[2034] Nucleotide sequence: transcript variant 1
   [2035] NCBI Reference Sequence: NM_{—}005496.3
   [2036] LOCUS: NM_{—}005496
   [2037] ACCESSION: NM_{—}005496
   [2038] VERSION: NM_{—}005496.3 GI:50658064
   [2039] SEQ ID NO: 196
[2040] Protein sequence:
   [2041] NCBI Reference Sequence: NP_{—}005487.3
   [2042] LOCUS NP_{—}005487
   [2043] ACCESSION NP_{—}005487
   [2044] VERSION: NP_{—}005487.3 GI:50658065
   [2045] SEQ ID NO: 197

### SPTAN1

[2046] Official Symbol: SPTAN1
[2047] Official Name: spectrin, alpha, non-erythrocytic 1
[2048] Gene ID: 6709
[2049] Organism: Homo sapiens
[2050] Other Aliases: EIEE5, NEAS, SPTA2
[2051] Other Designations: alpha-II spectrin; alpha-fodrin; fodrin alpha chain; spectrin alpha chain, non-erythrocytic 1; spectrin, non-erythroid alpha chain; spectrin, non-erythroid alpha subunit
[2052] Nucleotide sequence: transcript variant 1
   [2053] NCBI Reference Sequence: NM_{—}001130438.2
   [2054] LOCUS: NM_{—}001130438
   [2055] ACCESSION: NM_{—}001130438
   [2056] VERSION: NM_{—}001130438.2 GI:306966130
   [2057] SEQ ID NO: 198
[2058] Protein sequence: isoform 1
   [2059] NCBI Reference Sequence: NP_{—}001123910.1
   [2060] LOCUS NP_{—}001123910
   [2061] ACCESSION NP_{—}001123910
   [2062] VERSION: NP_{—}001123910.1 GI:194595509
   [2063] SEQ ID NO: 199
[2064] Nucleotide sequence: transcript variant 3
   [2065] NCBI Reference Sequence: NM_{—}001195532.1
   [2066] LOCUS: NM_{—}001195532
   [2067] ACCESSION: NM_{—}001195532
   [2068] VERSION: NM_{—}001195532.1 GI:306966131
   [2069] SEQ ID NO: 200
[2070] Protein sequence: isoform 3
   [2071] NCBI Reference Sequence: NP_{—}001182461.1
   [2072] LOCUS NP_{—}001182461
   [2073] ACCESSION NP_{—}001182461
   [2074] VERSION: NP_{—}001182461.1 GI:306966132
   [2075] SEQ ID NO: 201
[2076] Nucleotide sequence: transcript variant 2
   [2077] NCBI Reference Sequence: NM_{—}003127.3
   [2078] LOCUS: NM_{—}003127
   [2079] ACCESSION: NM_{—}003127
   [2080] VERSION: NM_{—}003127.3 GI:306966129
   [2081] SEQ ID NO: 202
[2082] Protein sequence: isoform 2
   [2083] NCBI Reference Sequence: NP_{—}003118.2
   [2084] LOCUS NP_{—}003118
   [2085] ACCESSION NP_{—}003118
   [2086] VERSION: NP_{—}003118.2 GI:154759259
   [2087] SEQ ID NO: 203

### STX6

[2088] Official Symbol: STX6
[2089] Official Name: syntaxin 6
[2090] Gene ID: 10228
[2091] Organism: Homo sapiens
[2092] Other Aliases: N/A
[2093] Other Designations: ntaxin-6
[2094] Nucleotide sequence:
   [2095] NCBI Reference Sequence: NM_{—}005819.4
   [2096] LOCUS: NM_{—}005819
   [2097] ACCESSION: NM_{—}005819
   [2098] VERSION: NM_{—}005819.4 GI:58294156
   [2099] SEQ ID NO: 204
[2100] Protein sequence:
   [2101] NCBI Reference Sequence: NP_{—}005810.1
   [2102] LOCUS NP_{—}005810
   [2103] ACCESSION NP_{—}005810
   [2104] VERSION: NP_{—}005810.1 GI:5032131
   [2105] SEQ ID NO: 205

### TJP2

[2106] Official Symbol: TJP2
[2107] Official Name: tight junction protein 2
[2108] Gene ID: 9414
[2109] Organism: Homo sapiens
[2110] Other Aliases: RP11-16N10.1, C9DUPq21.11, DFNA51, DUP9q21.11, X104, ZO2
[2111] Other Designations: Friedreich ataxia region gene X104 (tight junction protein ZO-2); tight junction protein ZO-2; zona occludens 2; zonula occludens protein 2
[2112] Nucleotide sequence: transcript variant 5
   [2113] NCBI Reference Sequence: NM_{—}001170414.2
   [2114] LOCUS: NM_{—}001170414
   [2115] ACCESSION: NM_{—}001170414
   [2116] VERSION: NM_{—}001170414.2 GI:358679293
   [2117] SEQ ID NO: 206
[2118] Protein sequence: isoform 5
   [2119] NCBI Reference Sequence: NP_{—}001163885.1
   [2120] LOCUS NP_{—}001163885
   [2121] ACCESSION NP_{—}001163885
   [2122] VERSION: NP_{—}001163885.1 GI:282165800
   [2123] SEQ ID NO: 207
[2124] Nucleotide sequence: transcript variant 4
   [2125] NCBI Reference Sequence: NM_{—}001170415.1
   [2126] LOCUS: NM_{—}001170415
   [2127] ACCESSION: NM_{—}001170415
   [2128] VERSION: NM_{—}001170415.1 GI:282165803
   [2129] SEQ ID NO: 208
[2130] Protein sequence: isoform 4
   [2131] NCBI Reference Sequence: NP_{—}001163886.1
   [2132] LOCUS NP_{—}001163886
   [2133] ACCESSION NP_{—}001163886
   [2134] VERSION: NP_{—}001163886.1 GI:282165804
   [2135] SEQ ID NO: 209
[2136] Nucleotide sequence: transcript variant 3
   [2137] NCBI Reference Sequence: NM_{—}001170416.1
   [2138] LOCUS: NM_{—}001170416
   [2139] ACCESSION: NM_{—}001170416
   [2140] VERSION: NM_{—}001170416.1 GI:282165809
   [2141] SEQ ID NO: 210
[2142] Protein sequence: isoform 3
   [2143] NCBI Reference Sequence: NP_{—}001163887.1
   [2144] LOCUS NP_{—}001163887
   [2145] ACCESSION NP_{—}001163887
   [2146] VERSION: NP_{—}001163887.1 GI:282165810
   [2147] SEQ ID NO: 211
[2148] Nucleotide sequence: transcript variant 6
   [2149] NCBI Reference Sequence: NM_{—}001170630.1
   [2150] LOCUS: NM_{—}001170630
   [2151] ACCESSION: NM_{—}001170630
   [2152] VERSION: NM_{—}001170630.1 GI:282165705
   [2153] SEQ ID NO: 212
[2154] Protein sequence: isoform 6
   [2155] NCBI Reference Sequence: NP_{—}001164101.1
   [2156] LOCUS NP_{—}001164101
   [2157] ACCESSION NP_{—}001164101
   [2158] VERSION: NP_{—}001164101.1 GI:282165706
   [2159] SEQ ID NO: 213
[2160] Nucleotide sequence: transcript variant 1
   [2161] NCBI Reference Sequence: NM_{—}004817.3
   [2162] LOCUS: NM_{—}004817
   [2163] ACCESSION: NM_{—}004817
   [2164] VERSION: NM_{—}004817.3 GI:282165795
   [2165] SEQ ID NO: 214
[2166] Protein sequence: isoform 1
   [2167] NCBI Reference Sequence: NP_{—}004808.2
   [2168] LOCUS NP_{—}004808
   [2169] ACCESSION NP_{—}004808
   [2170] VERSION: NP_{—}004808.2 GI:42518070
   [2171] SEQ ID NO: 215
[2172] Nucleotide sequence: transcript variant 2
   [2173] NCBI Reference Sequence: NM_{—}201629.3
   [2174] LOCUS: NM_{—}201629
   [2175] ACCESSION: NM_{—}201629
   [2176] VERSION: NM_{—}201629.3 GI:318067950
   [2177] SEQ ID NO: 216
[2178] Protein sequence: isoform 2
   [2179] NCBI Reference Sequence: NP_{—}963923.1
   [2180] LOCUS NP_{—}963923
   [2181] ACCESSION NP_{—}963923
   [2182] VERSION: NP_{—}963923.1 GI:42518065
   [2183] SEQ ID NO: 217

### TPM4

[2184] Official Symbol: TPM4
[2185] Official Name: tropomyosin 4
[2186] Gene ID: 7171
[2187] Organism: Homo sapiens
[2188] Other Aliases: N/A
[2189] Other Designations: TM30p1; tropomyosin alpha-4 chain; tropomyosin-4
[2190] Nucleotide sequence: transcript variant 1
   [2191] NCBI Reference Sequence: NM_{—}001145160.1
   [2192] LOCUS: NM_{—}001145160
   [2193] ACCESSION: NM_{—}001145160
   [2194] VERSION: NM_{—}001145160.1 GI:223555974
   [2195] SEQ ID NO: 218
[2196] Protein sequence: isoform 1
   [2197] NCBI Reference Sequence: NP_{—}001138632.1
   [2198] LOCUS NP_{—}001138632
   [2199] ACCESSION NP_{—}001138632
   [2200] VERSION: NP_{—}001138632.1 GI:223555975
   [2201] SEQ ID NO: 219
[2202] Nucleotide sequence: transcript variant 2
   [2203] NCBI Reference Sequence: NM_{—}003290.2
   [2204] LOCUS: NM_{—}003290
   [2205] ACCESSION: NM_{—}003290
   [2206] VERSION: NM_{—}003290.2 GI:223555973
   [2207] SEQ ID NO: 220
[2208] Protein sequence: isoform 2
   [2209] NCBI Reference Sequence: NP_{—}003281.1
   [2210] LOCUS NP_{—}003281
   [2211] ACCESSION NP_{—}003281
   [2212] VERSION: NP_{—}003281.1 GI:4507651
   [2213] SEQ ID NO: 221

### TSN

[2214] Official Symbol: TSN
[2215] Official Name: translin
[2216] Gene ID: 7247
[2217] Organism: Homo sapiens
[2218] Other Aliases: BCLF-1, C3PO, RCHF1, REHF-1, TBRBP, TRSLN
[2219] Other Designations: component 3 of promoter of RISC; recombination hotspot associated factor; recombination hotspot-binding protein; testis brain-RNA binding protein
[2220] Nucleotide sequence: transcript variant 2
   [2221] NCBI Reference Sequence: NM_{—}001261401.1
   [2222] LOCUS: NM_{—}001261401
   [2223] ACCESSION: NM_{—}001261401
   [2224] VERSION: NM_{—}001261401.1 GI:386869379
   [2225] SEQ ID NO: 222
[2226] Protein sequence: isoform 2
   [2227] NCBI Reference Sequence: NP_{—}001248330.1
   [2228] LOCUS NP_{—}001248330
   [2229] ACCESSION NP_{—}001248330
   [2230] VERSION: NP_{—}001248330.1 GI:386869380
   [2231] SEQ ID NO: 223
[2232] Nucleotide sequence: transcript variant 1
   [2233] NCBI Reference Sequence: NM_{—}004622.2
   [2234] LOCUS: NM_{—}004622
   [2235] ACCESSION: NM_{—}004622
   [2236] VERSION: NM_{—}004622.2 GI:20302160
   [2237] SEQ ID NO: 224
[2238] Protein sequence: isoform 1
   [2239] NCBI Reference Sequence: NP_{—}004613.1
   [2240] LOCUS NP_{—}004613
   [2241] ACCESSION NP_{—}004613
   [2242] VERSION: NP_{—}004613.1 GI:4759270
   [2243] SEQ ID NO: 225

### TUBA4A

[2244] Official Symbol: TUBA4A
[2245] Official Name: tubulin, alpha 4a
[2246] Gene ID: 7277
[2247] Organism: Homo sapiens
[2248] Other Aliases: H2-ALPHA, TUBA1
[2249] Other Designations: tubulin H2-alpha; tubulin alpha-1 chain; tubulin alpha-4A chain; tubulin, alpha 1 (testis specific)
[2250] Nucleotide sequence:
   [2251] NCBI Reference Sequence: NM_{—}006000.1
   [2252] LOCUS: NM_{—}006000
   [2253] ACCESSION: NM_{—}006000
   [2254] VERSION: NM_{—}006000.1 GI:17921988
   [2255] SEQ ID NO: 226
[2256] Protein sequence:
   [2257] NCBI Reference Sequence: NP_{—}005991.1
   [2258] LOCUS NP_{—}005991
   [2259] ACCESSION NP_{—}005991
   [2260] VERSION: NP_{—}005991.1 GI: 17921989
   [2261] SEQ ID NO: 227

[2262] TXNDC5
[2263] Official Symbol: TXNDC5
[2264] Official Name: thioredoxin domain containing 5 (endoplasmic reticulum)
[2265] Gene ID: 81567
[2266] Organism: Homo sapiens
[2267] Other Aliases: RP1-126E20.1, ENDOPDI, ERP46, HCC-2, PDIA15, STRF8, UNQ364
[2268] Other Designations: ER protein 46; endoplasmic reticulum protein ERp46; endoplasmic reticulum resident protein 46; endothelial protein disulphide isomerase; protein disulfide isomerase family A, member 15; thioredoxin domain-containing protein 5; thioredoxin related protein; thioredoxin-like protein p46
[2269] Nucleotide sequence: transcript variant 3
   [2270] NCBI Reference Sequence: NM_{—}001145549.2
   [2271] LOCUS: NM_{—}001145549
   [2272] ACCESSION: NM_{—}001145549
   [2273] VERSION: NM_{—}001145549.2 GI:313482855
   [2274] SEQ ID NO: 228
[2275] Protein sequence: isoform 3
   [2276] NCBI Reference Sequence: NP_{—}001139021.1
   [2277] LOCUS NP_{—}001139021
   [2278] ACCESSION NP_{—}001139021
   [2279] VERSION: NP_{—}001139021.1 GI:224493972
   [2280] SEQ ID NO: 229
[2281] Nucleotide sequence: transcript variant 1
   [2282] NCBI Reference Sequence: NM_{—}030810.3
   [2283] LOCUS: NM_{—}030810
   [2284] ACCESSION: NM_{—}030810
   [2285] VERSION: NM_{—}030810.3 GI:313482856
   [2286] SEQ ID NO: 230
[2287] Protein sequence: isoform 1 precursor
   [2288] NCBI Reference Sequence: NP_{—}110437.2
   [2289] LOCUS NP_{—}110437
   [2290] ACCESSION NP_{—}110437
   [2291] VERSION: NP_{—}110437.2 GI:42794771
   [2292] SEQ ID NO: 231

### TXNL1

[2293] Official Symbol: TXNL1
[2294] Official Name: thioredoxin-like 1
[2295] Gene ID: 9352
[2296] Organism: Homo sapiens
[2297] Other Aliases: TRP32, TXL-1, TXNL, Tx1
[2298] Other Designations: 32 kDa thioredoxin-related protein; thioredoxin-like protein 1; thioredoxin-related 32 kDa protein; thioredoxin-related protein 1
[2299] Nucleotide sequence: transcript variant 1
   [2300] NCBI Reference Sequence: NM_{—}004786.2
   [2301] LOCUS: NM_{—}004786
   [2302] ACCESSION: NM_{—}004786
   [2303] VERSION: NM_{—}004786.2 GI:215422360
   [2304] SEQ ID NO: 232
[2305] Protein sequence:
   [2306] NCBI Reference Sequence: NP_{—}004777.1
   [2307] LOCUS NP_{—}004777
   [2308] ACCESSION NP_{—}004777
   [2309] VERSION: NP_{—}004777.1 GI:4759274
   [2310] SEQ ID NO: 233

### VIM

[2311] Official Symbol: VIM
[2312] Official Name: vimentin
[2313] Gene ID: 431
[2314] Organism: Homo sapiens
[2315] Other Aliases: RP11-124N14.1
[2316] Other Designations: N/A
[2317] Nucleotide sequence:
   [2318] NCBI Reference Sequence: NM_{—}003380.3
   [2319] LOCUS: NM_{—}003380
   [2320] ACCESSION: NM_{—}003380
   [2321] VERSION: NM_{—}003380.3 GI:240849334
   [2322] SEQ ID NO: 234
[2323] Protein sequence:
   [2324] NCBI Reference Sequence: NP_{—}003371.2
   [2325] LOCUS NP_{—}003371
   [2326] ACCESSION NP_{—}003371
   [2327] VERSION: NP_{—}003371.2 GI:62414289
   [2328] SEQ ID NO: 235

### YWHAG

[2329] Official Symbol: YWHAG
[2330] Official Name: tyrosine 3-monooxygenase/tryptophan 5-monooxygenase activation protein, gamma polypeptide
[2331] Gene ID: 7532
[2332] Organism: Homo sapiens
[2333] Other Aliases: 14-3-3GAMMA
[2334] Other Designations: 14-3-3 gamma; 14-3-3 protein gamma; KCIP-1; protein kinase C inhibitor protein 1
[2335] Nucleotide sequence:
   [2336] NCBI Reference Sequence: NM_{—}012479.3
   [2337] LOCUS: NM_{—}012479
   [2338] ACCESSION: NM_{—}012479
   [2339] VERSION: NM_{—}012479.3 GI:194733744
   [2340] SEQ ID NO: 236
[2341] Protein sequence:
   [2342] NCBI Reference Sequence: NP_{—}036611.2
   [2343] LOCUS NP_{—}036611
   [2344] ACCESSION NP_{—}036611
   [2345] VERSION: NP_{—}036611.2 GI:21464101
   [2346] SEQ ID NO: 237

### ZNF207

[2347] Official Symbol: ZNF207
[2348] Official Name: zinc finger protein 207
[2349] Gene ID: 7756
[2350] Organism: Homo sapiens
[2351] Other Aliases: N/A
[2352] Other Designations: N/A
[2353] Nucleotide sequence: transcript variant 2
   [2354] NCBI Reference Sequence: NM_{—}001032293.2
   [2355] LOCUS: NM_{—}001032293
   [2356] ACCESSION: NM_{—}001032293
   [2357] VERSION: NM_{—}001032293.2 GI:148839356
   [2358] SEQ ID NO: 238
[2359] Protein sequence: isoform b
   [2360] NCBI Reference Sequence: NP_{—}001027464.1
   [2361] LOCUS NP_{—}001027464
   [2362] ACCESSION NP_{—}001027464
   [2363] VERSION: NP_{—}001027464.1 GI:73808090
   [2364] SEQ ID NO: 239
[2365] Nucleotide sequence: transcript variant 3
   [2366] NCBI Reference Sequence: NM_{—}001098507.1
   [2367] LOCUS: NM_{—}001098507
   [2368] ACCESSION: NM_{—}001098507
   [2369] VERSION: NM_{—}001098507.1 GI:148612834
   [2370] SEQ ID NO: 240
[2371] Protein sequence: isoform c
   [2372] NCBI Reference Sequence: NP_{—}001091977.1
   [2373] LOCUS NP_{—}001091977
   [2374] ACCESSION NP_{—}001091977
   [2375] VERSION: NP_{—}001091977.1 GI:148612835
   [2376] SEQ ID NO: 241 Nucleotide sequence: transcript variant 1
   [2377] NCBI Reference Sequence: NM_{—}003457.3
   [2378] LOCUS: NM_{—}003457
   [2379] ACCESSION: NM_{—}003457
   [2380] VERSION: NM_{—}003457.3 GI:148839312
   [2381] SEQ ID NO: 242
[2382] Protein sequence: isoform a
   [2383] NCBI Reference Sequence: NP_{—}003448.1
   [2384] LOCUS NP_{—}003448
   [2385] ACCESSION NP_{—}003448
   [2386] VERSION: NP_{—}003448.1 GI:4508017
   [2387] SEQ ID NO: 243

### VI. DIAGNOSTIC/PROGNOSTIC USES OF THE INVENTION

[2388] The invention provides methods for diagnosing a pervasive developmental disorder in a subject, such as, without limitation, autism or Alzheimer's disease. The invention further provides methods for prognosing whether a subject is predisposed to developing a pervasive developmental disorder, e.g., autism or Alzheimer's disease. The invention further provides methods for prognosing response of a pervasive developmental disorder, such as, without limitation, autism or Alzheimer's disease, to a therapeutic treatment. These methods involve the markers of the invention, identified herein and listed in Tables 2-6.

[2389] In some embodiments of the present invention, one or more biomarkers is used in connection with the methods of the present invention. As used herein, the term “one or more biomarkers” is intended to mean that at least one biomarker in a disclosed list of biomarkers is assayed and, in various embodiments, more than one biomarker set forth in the list may be assayed, such as two, three, four, five, six, seven, eight, nine, ten, fifteen, twenty, twenty five, thirty, thirty five, forty, forty five, fifty, fifty five, sixty, sixty five, more than sixty five, or all the biomarkers in the list may be assayed. In one embodiment, a panel of biomarkers is used in connection with the methods of the present invention, such that the panel of biomarkers comprises two, three, four, five, six, seven, eight, nine, ten, fifteen, twenty, twenty five, thirty, thirty five, forty, forty five, fifty, fifty five, sixty, sixty five, more than sixty five, or all the biomarkers in the list. In one embodiment, two or more, three or more, four or more, five or more, six or more, seven of more, eight or more, nine or more, ten or more, fifteen or more, twenty or more, twenty five or more, thirty or more, thirty five or more, forty or more, forty five or more, sixty or more, sixty five or more, or all of the biomarkers in the list, are used in connection with the methods of the present invention.

[2390] Any suitable analytical method, can be utilized in the methods of the invention to assess (directly or indirectly) the level of expression of a biomarker in a sample. In an embodiment, a difference is observed between the level of expression of a biomarker, as compared to the control level of expression of the biomarker. In one embodiment, the difference is greater than the limit of detection of the method for determining the expression level of the biomarker. In further embodiments, the difference is greater than or equal to the standard error of the assessment method, e.g., the difference is at least about 2-, about 3-, about 4-, about 5-, about 6-, about 7-, about 8-, about 9-, about 10-, about 15-, about 20-, about 25-, about 100-, about 500- or about 1000-fold greater than the standard error of the assessment method. In an embodiment, the level of expression of the biomarker in a sample as compared to a control level of expression is assessed using parametric or nonparametric descriptive statistics, comparisons, regression analyses, and the like.

[2391] In an embodiment, a difference in the level of expression of the biomarker in the sample derived from the subject is detected relative to the control, and the difference is about 5%, about 10%, about 15%, about 20%, about 25%, about 30%, about 40%, about 50%, about 60%, about 70%, about 80%, or about 90% more or less than the expression level of the biomarker in the control or normal sample.

[2392] In an embodiment, a difference in the level of expression of the biomarker in the sample derived from the subject is detected relative to the control, and the difference is about 1.1, about 1.2, about 1.3, about 1.4, about 1.5, about 1.6, about 1.7, about 1.8, about 1.9, about 2, about 3, about 4, about 5, about 6, about 7, about 8, about 9, about 10, about 15, about 20, about 25, about 30, about 35, about 40, about 45, about 50, about 55, about 60, about 65, about 70, about 75, about 80, about 85, about 90, about 95, or about 100 fold more or less than the expression level of the biomarker in the control or normal sample.

[2393] In embodiments where more than one marker is detected, the differences in expression may be different for each marker, or all of markers may have an equivalent minimum level of modulation, e.g., each of the markers detected is at least about 1.1, about 1.2, about 1.3, about 1.4, about 1.5, about 1.6, about 1.7, about 1.8, about 1.9, about 2, about 3, about 4, about 5, about 6, about 7, about 8, about 9, about 10, about 15, about 20, about 25, about 30, about 35, about 40, about 45, about 50, about 55, about 60, about 65, about 70, about 75, about 80, about 85, about 90, about 95, or about 100 fold up-modulated or down-modulated as compared to the expression level of the respective biomarker in the control or normal sample.

[2394] The level of expression of a biomarker, for example one or more markers in Tables 2-6, in a sample obtained from a subject may be assayed by any of a wide variety of techniques and methods, which transform the biomarker within the sample into a moiety that can be detected and/or quantified. Non-limiting examples of such methods include analyzing the sample using immunological methods for detection of proteins, protein purification methods, protein function or activity assays, nucleic acid hybridization methods, nucleic acid reverse transcription methods, and nucleic acid amplification methods, immunoblotting, Western blotting, Northern blotting, electron microscopy, mass spectrometry, e.g., MALDI-TOF and SELDI-TOF, immunoprecipitations, immunofluorescence, immunohistochemistry, enzyme linked immunosorbent assays (ELISAs), e.g., amplified ELISA, quantitative blood based assays, e.g., serum ELISA, quantitative urine based assays, flow cytometry, Southern hybridizations, array analysis, and the like, and combinations or sub-combinations thereof.

[2395] In one embodiment, the level of expression of the biomarker in a sample is determined by detecting a transcribed polynucleotide, or portion thereof, e.g., mRNA, or cDNA, of the biomarker gene. RNA may be extracted from cells using RNA extraction techniques including, for example, using acid phenol/guanidine isothiocyanate extraction (RNAzol B; Biogenesis), RNeasy RNA preparation kits (Qiagen) or PAXgene (PreAnalytix, Switzerland). Typical assay formats utilizing ribonucleic acid hybridization include nuclear run-on assays, RT-PCR, quantitative PCR analysis, RNase protection assays (Melton et al., Nuc. Acids Res. 12:7035), Northern blotting and in situ hybridization. Other suitable systems for mRNA sample analysis include microarray analysis (e.g., using Affymetrix's microarray system or Illumina's BeadArray Technology).

[2396] In one embodiment, the level of expression of the biomarker is determined using a nucleic acid probe. The term “probe”, as used herein, refers to any molecule that is capable of selectively binding to a specific biomarker. Probes can be synthesized by one of skill in the art, or derived from appropriate biological preparations. Probes can be specifically designed to be labeled, by addition or incorporation of a label. Examples of molecules that can be utilized as probes include, but are not limited to, RNA, DNA, proteins, antibodies, and organic molecules.

[2397] As indicated above, isolated mRNA can be used in hybridization or amplification assays that include, but are not limited to, Southern or Northern analyses, polymerase chain reaction (PCR) analyses and probe arrays. One method for the determination of mRNA levels involves contacting the isolated mRNA with a nucleic acid molecule (probe) that can hybridize to the biomarker mRNA. The nucleic acid probe can be, for example, a full-length cDNA, or a portion thereof, such as an oligonucleotide of at least about 7, 10, 15, 20, 25, 30, 35, 40, 45, 50, 100, 250 or about 500 nucleotides in length and sufficient to specifically hybridize under appropriate hybridization conditions to the biomarker genomic DNA. In a particular embodiment, the probe will bind the biomarker genomic DNA under stringent conditions. Such stringent conditions, for example, hybridization in 6× sodium chloride/sodium citrate (SSC) at about 45° C., followed by one or more washes in 0.2× SSC, 0.1% SDS at 50-65° C., are known to those skilled in the art and can be found in Current Protocols in Molecular Biology, Ausubel et al., eds., John Wiley & Sons, Inc. (1995), sections 2, 4, and 6, the teachings of which are hereby incorporated by reference herein. Additional stringent conditions can be found in Molecular Cloning: A Laboratory Manual, Sambrook et al., Cold Spring Harbor Press, Cold Spring Harbor, N.Y. (1989), chapters 7, 9, and 11, the teachings of which are hereby incorporated by reference herein.

[2398] In one embodiment, the mRNA is immobilized on a solid surface and contacted with a probe, for example by running the isolated mRNA on an agarose gel and transferring the mRNA from the gel to a membrane, such as nitrocellulose. In an alternative embodiment, the probe(s) are immobilized on a solid surface, for example, in an Affymetrix gene chip array, and the probe(s) are contacted with mRNA. A skilled artisan can readily adapt mRNA detection methods for use in determining the level of the biomarker mRNA.

[2399] The level of expression of the biomarker in a sample can also be determined using methods that involve the use of nucleic acid amplification and/or reverse transcriptase (to prepare cDNA) of for example mRNA in the sample, e.g., by RT-PCR (the experimental embodiment set forth in Mullis, 1987, U.S. Pat. No. 4,683,202), ligase chain reaction (Barany (1991) Proc. Natl. Acad. Sci. USA 88:189-193), self-sustained sequence replication (Guatelli et al. (1990) Proc. Natl. Acad. Sci. USA 87:1874-1878), transcriptional amplification system (Kwoh et al. (1989) Proc. Natl. Acad. Sci. USA 86:1173-1177), Q-Beta Replicase (Lizardi et al. (1988) Bio/Technology 6:1197), rolling circle replication (Lizardi et al., U.S. Pat. No. 5,854,033) or any other nucleic acid amplification method, followed by the detection of the amplified molecules. These approaches are especially useful for the detection of nucleic acid molecules if such molecules are present in very low numbers. In particular aspects of the invention, the level of expression of the biomarker is determined by quantitative fluorogenic RT-PCR (e.g., the TaqMan™ System). Such methods typically utilize pairs of oligonucleotide primers that are specific for the biomarker. Methods for designing oligonucleotide primers specific for a known sequence are well known in the art.

[2400] The expression levels of biomarker mRNA can be monitored using a membrane blot (such as used in hybridization analysis such as Northern, Southern, dot, and the like), or microwells, sample tubes, gels, beads or fibers (or any solid support comprising bound nucleic acids). See, for example, U.S. Pat. Nos. 5,770,722; 5,874,219; 5,744,305; 5,677,195; and 5,445,934, the entire contents of which as they relate to these assays are incorporated herein by reference. The determination of biomarker expression level may also comprise using nucleic acid probes in solution.

[2401] In one embodiment of the invention, microarrays are used to detect the level of expression of a biomarker. Microarrays are particularly well suited for this purpose because of the reproducibility between different experiments. DNA microarrays provide one method for the simultaneous measurement of the expression levels of large numbers of genes. Each array consists of a reproducible pattern of capture probes attached to a solid support. Labeled RNA or DNA is hybridized to complementary probes on the array and then detected by laser scanning. Hybridization intensities for each probe on the array are determined and converted to a quantitative value representing relative gene expression levels. See, e.g., U.S. Pat. Nos. 6,040,138; 5,800,992; 6,020,135; 6,033,860; and 6,344,316, the entire contents of which as they relate to these assays are incorporated herein by reference. High-density oligonucleotide arrays are particularly useful for determining the gene expression profile for a large number of RNA's in a sample.

[2402] Expression of a biomarker can also be assessed at the protein level, using a detection reagent that detects the protein product encoded by the mRNA of the biomarker, directly or indirectly. For example, if an antibody reagent is available that binds specifically to a biomarker protein product to be detected, then such an antibody reagent can be used to detect the expression of the biomarker in a sample from the subject, using techniques, such as immunohistochemistry, ELISA, FACS analysis, and the like.

[2403] Other known methods for detecting the biomarker at the protein level include methods such as electrophoresis, capillary electrophoresis, high performance liquid chromatography (HPLC), thin layer chromatography (TLC), hyperdiffusion chromatography, and the like, or various immunological methods such as fluid or gel precipitation reactions, immunodiffusion (single or double), immunoelectrophoresis, radioimmunoassay (RIA), enzyme-linked immunosorbent assays (ELISAs), immunofluorescent assays, and Western blotting.

[2404] Proteins from samples can be isolated using a variety of techniques, including those well known to those of skill in the art. The protein isolation methods employed can, for example, be those described in Harlow and Lane (Harlow and Lane, 1988, Antibodies: A Laboratory Manual, Cold. Spring Harbor Laboratory Press, Cold Spring Harbor, N.Y.).

[2405] In one embodiment, antibodies, or antibody fragments, are used in methods such as Western blots or immunofluorescence techniques to detect the expressed proteins. Antibodies for determining the expression of the biomarkers of the invention are commercially available.

[2406] The antibody or protein can be immobilized on a solid support for Western blots and immunofluorescence techniques. Suitable solid phase supports or carriers include any support capable of binding an antigen or an antibody. Well-known supports or carriers include glass, polystyrene, polypropylene, polyethylene, dextran, nylon, amylases, natural and modified celluloses, polyacrylamides, gabbros, and magnetite.

[2407] One skilled in the art will know many other suitable carriers for binding antibody or antigen, and will be able to adapt such support for use with the present invention. For example, protein isolated from cells can be run on a polyacrylamide gel electrophoresis and immobilized onto a solid phase support such as nitrocellulose. The support can then be washed with suitable buffers followed by treatment with the detectably labeled antibody. The solid phase support can then be washed with the buffer a second time to remove unbound antibody. The amount of bound label on the solid support can then be detected by conventional means. Means of detecting proteins using electrophoretic techniques are well known to those of skill in the art (see generally, R. Scopes (1982) Protein Purification, Springer-Verlag, N.Y.; Deutscher, (1990) Methods in Enzymology Vol. 182: Guide to Protein Purification, Academic Press, Inc., N.Y.).

[2408] Other standard methods include immunoassay techniques which are well known to one of ordinary skill in the art and may be found in Principles And Practice Of Immunoassay, 2nd Edition, Price and Newman, eds., MacMillan (1997) and Antibodies, A Laboratory Manual, Harlow and Lane, eds., Cold Spring Harbor Laboratory, Ch. 9 (1988).

[2409] In one embodiment of the invention, proteomic methods, e.g., mass spectrometry, are used. Mass spectrometry is an analytical technique that consists of ionizing chemical compounds to generate charged molecules (or fragments thereof) and measuring their mass-to-charge ratios. In a typical mass spectrometry procedure, a sample is obtained from a subject, loaded onto the mass spectrometry, and its components (e.g., the biomarker) are ionized by different methods (e.g., by impacting them with an electron beam), resulting in the formation of charged particles (ions). The mass-to-charge ratio of the particles is then calculated from the motion of the ions as they transit through electromagnetic fields.

[2410] For example, matrix-associated laser desorption/ionization time-of-flight mass spectrometry (MALDI-TOF MS) or surface-enhanced laser desorption/ionization time-of-flight mass spectrometry (SELDI-TOF MS) which involves the application of a biological sample, such as serum, to a protein-binding chip (Wright, G. L., Jr., et al. (2002) Expert Rev Mol Diagn 2:549; Li, J., et al. (2002) Clin Chem 48:1296; Laronga, C., et al. (2003) Dis biomarkers 19:229; Petricoin, E. F., et al. (2002) 359:572; Adam, B. L., et al. (2002) Cancer Res 62:3609; Tolson, J., et al. (2004) Lab Invest 84:845; Xiao, Z., et al. (2001) Cancer Res 61:6029) can be used to determine the expression level of a biomarker at the protein level.

[2411] Furthermore, in vivo techniques for determination of the expression level of the biomarker include introducing into a subject a labeled antibody directed against the biomarker, which binds to and transforms the biomarker into a detectable molecule. As discussed above, the presence, level, or even location of the detectable biomarker in a subject may be detected by standard imaging techniques.

[2412] In general, where a difference in the level of expression of a biomarker and the control is to be detected, it is preferable that the difference between the level of expression of the biomarker in a sample from a subject having a pervasive developmental disorder (e.g., autism or Alzheimer's disease), and the amount of the biomarker in a control sample, is as great as possible. Although this difference can be as small as the limit of detection of the method for determining the level of expression, it is preferred that the difference be greater than the limit of detection of the method or greater than the standard error of the assessment method, and preferably a difference of at least about 2-, about 3-, about 4-, about 5-, about 6-, about 7-, about 8-, about 9-, about 10-, about 15-, about 20-, about 25-, about 100-, about 500-, 1000-fold greater than the standard error of the assessment method.

[2413] Any suitable sample obtained from a subject having a pervasive developmental disorder (e.g., autism or Alzheimer's disease) may be used to assess the level of expression, including a lack of expression, of the biomarker, for example one or more markers in Tables 2-6. For example, the sample may be any fluid or component thereof, such as a fraction or extract, e.g., blood, plasma, lymph, synovial fluid, cystic fluid, urine, nipple aspirates, or fluids collected from a biopsy, amniotic fluid, aqueous humor, vitreous humor, bile, blood, breast milk, cerebrospinal fluid, cerumen, chyle, cystic fluid, endolymph, feces, gastric acid, gastric juice, mucus, pericardial fluid, perilymph, peritoneal fluid, plasma, pleural fluid, pus, saliva, sebum, semen, sweat, serum, sputum, synovial fluid, joint tissue or fluid, tears, or vaginal secretions obtained from the subject. In a typical situation, the fluid may be blood, or a component thereof, obtained from the subject, including whole blood or components thereof, including, plasma, serum, and blood cells, such as red blood cells, white blood cells and platelets. In another typical situation, the fluid may be synovial fluid, joint tissue or fluid, or any other sample reflective of a pervasive developmental disorder (e.g., autism or Alzheimer's disease). The sample may also be any tissue or component thereof, connective tissue, lymph tissue or muscle tissue obtained from the subject.

[2414] Techniques or methods for obtaining samples from a subject are well known in the art and include, for example, obtaining samples by a mouth swab or a mouth wash; drawing blood; obtaining a biopsy; or obtaining other sample from a subject suffering from a pervasive developmental disorder (e.g., autism or Alzheimer's disease). Isolating components of fluid or tissue samples (e.g., cells or RNA or DNA) may be accomplished using a variety of techniques. After the sample is obtained, it may be further processed.

### Predictive Medicine

[2415] The present invention pertains to the field of predictive medicine in which diagnostic assays, prognostic assays, pharmacogenomics, and monitoring clinical trials are used for prognostic (predictive) purposes to thereby treat an individual prophylactically. Accordingly, one aspect of the present invention relates to diagnostic assays for determining the level of expression of one or more marker proteins or nucleic acids, in order to determine whether an individual is at risk of developing a pervasive developmental disorder, such as, without limitation, autism or Alzheimer's disease. Such assays can be used for prognostic or predictive purposes to thereby prophylactically treat an individual prior to the onset of the disorder.

[2416] Yet another aspect of the invention pertains to monitoring the influence of agents (e.g., drugs or other compounds administered either to treat a pervasive developmental disorder or symptoms of a pervasive developmental disorder) on the expression or activity of a marker of the invention in clinical trials. These and other agents are described in further detail in the following sections.

[2417] A. Diagnostic Assays

[2418] An exemplary method for detecting the presence or absence of a marker protein or nucleic acid in a biological sample involves obtaining a biological sample (e.g. a pervasive developmental disorder-associated tissue or body fluid) from a test subject and contacting the biological sample with a compound or an agent capable of detecting the polypeptide or nucleic acid (e.g., mRNA, genomic DNA, or cDNA). The detection methods of the invention can thus be used to detect mRNA, protein, cDNA, or genomic DNA, for example, in a biological sample in vitro as well as in vivo. For example, in vitro techniques for detection of mRNA include Northern hybridizations and in situ hybridizations. In vitro techniques for detection of a marker protein include enzyme linked immunosorbent assays (ELISAs), Western blots, immunoprecipitations and immunofluorescence. In vitro techniques for detection of genomic DNA include Southern hybridizations. In vivo techniques for detection of mRNA include polymerase chain reaction (PCR), Northern hybridizations and in situ hybridizations. Furthermore, in vivo techniques for detection of a marker protein include introducing into a subject a labeled antibody directed against the protein or fragment thereof. For example, the antibody can be labeled with a radioactive marker whose presence and location in a subject can be detected by standard imaging techniques.

[2419] A general principle of such diagnostic and prognostic assays involves preparing a sample or reaction mixture that may contain a marker, and a probe, under appropriate conditions and for a time sufficient to allow the marker and probe to interact and bind, thus forming a complex that can be removed and/or detected in the reaction mixture. These assays can be conducted in a variety of ways.

[2420] For example, one method to conduct such an assay would involve anchoring the marker or probe onto a solid phase support, also referred to as a substrate, and detecting target marker/probe complexes anchored on the solid phase at the end of the reaction. In one embodiment of such a method, a sample from a subject, which is to be assayed for presence and/or concentration of marker, can be anchored onto a carrier or solid phase support. In another embodiment, the reverse situation is possible, in which the probe can be anchored to a solid phase and a sample from a subject can be allowed to react as an unanchored component of the assay.

[2421] There are many established methods for anchoring assay components to a solid phase. These include, without limitation, marker or probe molecules which are immobilized through conjugation of biotin and streptavidin. Such biotinylated assay components can be prepared from biotin-NHS (N-hydroxy-succinimide) using techniques known in the art (e.g., biotinylation kit, Pierce Chemicals, Rockford, Ill.), and immobilized in the wells of streptavidin-coated 96 well plates (Pierce Chemical). In certain embodiments, the surfaces with immobilized assay components can be prepared in advance and stored.

[2422] Other suitable carriers or solid phase supports for such assays include any material capable of binding the class of molecule to which the marker or probe belongs. Well-known supports or carriers include, but are not limited to, glass, polystyrene, nylon, polypropylene, nylon, polyethylene, dextran, amylases, natural and modified celluloses, polyacrylamides, gabbros, and magnetite.

[2423] In order to conduct assays with the above mentioned approaches, the non-immobilized component is added to the solid phase upon which the second component is anchored. After the reaction is complete, uncomplexed components may be removed (e.g., by washing) under conditions such that any complexes formed will remain immobilized upon the solid phase. The detection of marker/probe complexes anchored to the solid phase can be accomplished in a number of methods outlined herein.

[2424] In a preferred embodiment, the probe, when it is the unanchored assay component, can be labeled for the purpose of detection and readout of the assay, either directly or indirectly, with detectable labels discussed herein and which are well-known to one skilled in the art.

[2425] It is also possible to directly detect marker/probe complex formation without further manipulation or labeling of either component (marker or probe), for example by utilizing the technique of fluorescence energy transfer (see, for example, Lakowicz et al., U.S. Pat. No. 5,631,169; Stavrianopoulos, et al., U.S. Pat. No. 4,868,103). A fluorophore label on the first, ‘donor’ molecule is selected such that, upon excitation with incident light of appropriate wavelength, its emitted fluorescent energy will be absorbed by a fluorescent label on a second ‘acceptor’ molecule, which in turn is able to fluoresce due to the absorbed energy. Alternately, the ‘donor’ protein molecule may simply utilize the natural fluorescent energy of tryptophan residues. Labels are chosen that emit different wavelengths of light, such that the ‘acceptor’ molecule label may be differentiated from that of the ‘donor’. Since the efficiency of energy transfer between the labels is related to the distance separating the molecules, spatial relationships between the molecules can be assessed. In a situation in which binding occurs between the molecules, the fluorescent emission of the ‘acceptor’ molecule label in the assay should be maximal. An FET binding event can be conveniently measured through standard fluorometric detection means well known in the art (e.g., using a fluorimeter).

[2426] In another embodiment, determination of the ability of a probe to recognize a marker can be accomplished without labeling either assay component (probe or marker) by utilizing a technology such as real-time Biomolecular Interaction Analysis (BIA) (see, e.g., Sjolander, S. and Urbaniczky, C., 1991, Anal. Chem. 63:2338-2345 and Szabo et al., 1995, Curr. Opin. Struct. Biol. 5:699-705). As used herein, “BIA” or “surface plasmon resonance” is a technology for studying biospecific interactions in real time, without labeling any of the interactants (e.g., BIAcore). Changes in the mass at the binding surface (indicative of a binding event) result in alterations of the refractive index of light near the surface (the optical phenomenon of surface plasmon resonance (SPR)), resulting in a detectable signal which can be used as an indication of real-time reactions between biological molecules.

[2427] Alternatively, in another embodiment, analogous diagnostic and prognostic assays can be conducted with marker and probe as solutes in a liquid phase. In such an assay, the complexed marker and probe are separated from uncomplexed components by any of a number of standard techniques, including but not limited to: differential centrifugation, chromatography, electrophoresis and immunoprecipitation. In differential centrifugation, marker/probe complexes may be separated from uncomplexed assay components through a series of centrifugal steps, due to the different sedimentation equilibria of complexes based on their different sizes and densities (see, for example, Rivas, G., and Minton, A. P., 1993, Trends Biochem Sci. 18(8):284-7). Standard chromatographic techniques may also be utilized to separate complexed molecules from uncomplexed ones. For example, gel filtration chromatography separates molecules based on size, and through the utilization of an appropriate gel filtration resin in a column format, for example, the relatively larger complex may be separated from the relatively smaller uncomplexed components. Similarly, the relatively different charge properties of the marker/probe complex as compared to the uncomplexed components may be exploited to differentiate the complex from uncomplexed components, for example through the utilization of ion-exchange chromatography resins. Such resins and chromatographic techniques are well known to one skilled in the art (see, e.g., Heegaard, N. H., 1998, J. Mol. Recognit. Winter 11(1-6):141-8; Hage, D.S., and Tweed, S. A. J Chromatogr B Biomed Sci Appl 1997 Oct. 10;699(1-2):499-525). Gel electrophoresis may also be employed to separate complexed assay components from unbound components (see, e.g., Ausubel et al., ed., Current Protocols in Molecular Biology, John Wiley & Sons, New York, 1987-1999). In this technique, protein or nucleic acid complexes are separated based on size or charge, for example. In order to maintain the binding interaction during the electrophoretic process, non-denaturing gel matrix materials and conditions in the absence of reducing agent are typically preferred. Appropriate conditions to the particular assay and components thereof will be well known to one skilled in the art.

[2428] In a particular embodiment, the level of marker mRNA can be determined both by in situ and by in vitro formats in a biological sample using methods known in the art. The term “biological sample” is intended to include tissues, cells, biological fluids and isolates thereof, isolated from a subject, as well as tissues, cells and fluids present within a subject. Many expression detection methods use isolated RNA. For in vitro methods, any RNA isolation technique that does not select against the isolation of mRNA can be utilized for the purification of RNA from cells (see, e.g., Ausubel et al., ed., Current Protocols in Molecular Biology, John Wiley & Sons, New York 1987-1999). Additionally, large numbers of tissue samples can readily be processed using techniques well known to those of skill in the art, such as, for example, the single-step RNA isolation process of Chomczynski (1989, U.S. Pat. No. 4,843,155).

[2429] The isolated mRNA can be used in hybridization or amplification assays that include, but are not limited to, Southern or Northern analyses, polymerase chain reaction analyses and probe arrays. One preferred diagnostic method for the detection of mRNA levels involves contacting the isolated mRNA with a nucleic acid molecule (probe) that can hybridize to the mRNA encoded by the gene being detected. The nucleic acid probe can be, for example, a full-length cDNA, or a portion thereof, such as an oligonucleotide of at least 7, 15, 30, 50, 100, 250 or 500 nucleotides in length and sufficient to specifically hybridize under stringent conditions to a mRNA or genomic DNA encoding a marker of the present invention. Other suitable probes for use in the diagnostic assays of the invention are described herein. Hybridization of an mRNA with the probe indicates that the marker in question is being expressed.

[2430] In one format, the mRNA is immobilized on a solid surface and contacted with a probe, for example by running the isolated mRNA on an agarose gel and transferring the mRNA from the gel to a membrane, such as nitrocellulose. In an alternative format, the probe(s) are immobilized on a solid surface and the mRNA is contacted with the probe(s), for example, in an Affymetrix gene chip array. A skilled artisan can readily adapt known mRNA detection methods for use in detecting the level of mRNA encoded by the markers of the present invention.

[2431] An alternative method for determining the level of mRNA marker in a sample involves the process of nucleic acid amplification, e.g., by RT-PCR (the experimental embodiment set forth in Mullis, 1987, U.S. Pat. No. 4,683,202), ligase chain reaction (Barany, 1991, Proc. Natl. Acad. Sci. USA, 88:189-193), self sustained sequence replication (Guatelli et al., 1990, Proc. Natl. Acad. Sci. USA 87:1874-1878), transcriptional amplification system (Kwoh et al., 1989, Proc. Natl. Acad. Sci. USA 86:1173-1177), Q-Beta Replicase (Lizardi et al., 1988, Bio/Technology 6:1197), rolling circle replication (Lizardi et al., U.S. Pat. No. 5,854,033) or any other nucleic acid amplification method, followed by the detection of the amplified molecules using techniques well known to those of skill in the art. These detection schemes are especially useful for the detection of nucleic acid molecules if such molecules are present in very low numbers. As used herein, amplification primers are defined as being a pair of nucleic acid molecules that can anneal to 5′ or 3′ regions of a gene (plus and minus strands, respectively, or vice-versa) and contain a short region in between. In general, amplification primers are from about 10 to 30 nucleotides in length and flank a region from about 50 to 200 nucleotides in length. Under appropriate conditions and with appropriate reagents, such primers permit the amplification of a nucleic acid molecule comprising the nucleotide sequence flanked by the primers.

[2432] For in situ methods, mRNA does not need to be isolated from the prior to detection. In such methods, a cell or tissue sample is prepared/processed using known histological methods. The sample is then immobilized on a support, typically a glass slide, and then contacted with a probe that can hybridize to mRNA that encodes the marker.

[2433] As an alternative to making determinations based on the absolute expression level of the marker, determinations may be based on the normalized expression level of the marker. Expression levels are normalized by correcting the absolute expression level of a marker by comparing its expression to the expression of a gene that is not a marker, e.g., a housekeeping gene that is constitutively expressed. Suitable genes for normalization include housekeeping genes such as the actin gene, or epithelial cell-specific genes. This normalization allows the comparison of the expression level in one sample, e.g., a patient sample, to another sample, e.g., a non-diseased sample, or between samples from different sources.

[2434] Alternatively, the expression level can be provided as a relative expression level. To determine a relative expression level of a marker, the level of expression of the marker is determined for 10 or more samples of normal versus pervasive developmental disorder cell isolates, preferably 50 or more samples, prior to the determination of the expression level for the sample in question. The mean expression level of each of the genes assayed in the larger number of samples is determined and this is used as a baseline expression level for the marker. The expression level of the marker determined for the test sample (absolute level of expression) is then divided by the mean expression value obtained for that marker. This provides a relative expression level.

[2435] Preferably, the samples used in the baseline determination will be from cells from a subject that is a normal, healthy control, e.g., cells from a subject that is not afflicted with a pervasive developmental disorder. The choice of the cell source is dependent on the use of the relative expression level. Using expression found in normal tissues as a mean expression score aids in validating whether the marker assayed is specific to a pervasive developmental disorder (versus normal cells). In addition, as more data is accumulated, the mean expression value can be revised, providing improved relative expression values based on accumulated data.

[2436] In another embodiment of the present invention, a marker protein is detected. A preferred agent for detecting marker protein of the invention is an antibody capable of binding to such a protein or a fragment thereof, preferably an antibody with a detectable label. Antibodies can be polyclonal, or more preferably, monoclonal. An intact antibody, or a fragment or derivative thereof (e.g., Fab or F(ab′)₂) can be used. The term “labeled”, with regard to the probe or antibody, is intended to encompass direct labeling of the probe or antibody by coupling (i.e., physically linking) a detectable substance to the probe or antibody, as well as indirect labeling of the probe or antibody by reactivity with another reagent that is directly labeled. Examples of indirect labeling include detection of a primary antibody using a fluorescently labeled secondary antibody and end-labeling of a DNA probe with biotin such that it can be detected with fluorescently labeled streptavidin.

[2437] Proteins from cells can be isolated using techniques that are well known to those of skill in the art. The protein isolation methods employed can, for example, be such as those described in Harlow and Lane (Harlow and Lane, 1988, Antibodies: A Laboratory Manual, Cold Spring Harbor Laboratory Press, Cold Spring Harbor, N.Y.).

[2438] A variety of formats can be employed to determine whether a sample contains a protein that binds to a given antibody. Examples of such formats include, but are not limited to, enzyme immunoassay (EIA), radioimmunoassay (RIA), Western blot analysis and enzyme linked immunoabsorbant assay (ELISA). A skilled artisan can readily adapt known protein/antibody detection methods for use in determining whether cells express a marker of the present invention.

[2439] In one format, antibodies, or antibody fragments or derivatives, can be used in methods such as Western blots or immunofluorescence techniques to detect the expressed proteins. In such uses, it is generally preferable to immobilize either the antibody or proteins on a solid support. Suitable solid phase supports or carriers include any support capable of binding an antigen or an antibody. Well-known supports or carriers include glass, polystyrene, polypropylene, polyethylene, dextran, nylon, amylases, natural and modified celluloses, polyacrylamides, gabbros, and magnetite.

[2440] One skilled in the art will know many other suitable carriers for binding antibody or antigen, and will be able to adapt such support for use with the present invention. For example, protein isolated from pervasive developmental disorder cells can be run on a polyacrylamide gel electrophoresis and immobilized onto a solid phase support such as nitrocellulose. The support can then be washed with suitable buffers followed by treatment with the detectably labeled antibody. The solid phase support can then be washed with the buffer a second time to remove unbound antibody. The amount of bound label on the solid support can then be detected by conventional means.

[2441] The invention also encompasses kits for detecting the presence of a marker protein or nucleic acid in a biological sample. Such kits can be used to determine if a subject is suffering from or is at increased risk of developing a pervasive developmental disorder. For example, the kit can comprise a labeled compound or agent capable of detecting a marker protein or nucleic acid in a biological sample and means for determining the amount of the protein or mRNA in the sample (e.g., an antibody which binds the protein or a fragment thereof, or an oligonucleotide probe which binds to DNA or mRNA encoding the protein). Kits can also include instructions for interpreting the results obtained using the kit.

[2442] For antibody-based kits, the kit can comprise, for example: (1) a first antibody (e.g., attached to a solid support) which binds to a marker protein; and, optionally, (2) a second, different antibody which binds to either the protein or the first antibody and is conjugated to a detectable label.

[2443] For oligonucleotide-based kits, the kit can comprise, for example: (1) an oligonucleotide, e.g., a detectably labeled oligonucleotide, which hybridizes to a nucleic acid sequence encoding a marker protein or (2) a pair of primers useful for amplifying a marker nucleic acid molecule. The kit can also comprise, e.g., a buffering agent, a preservative, or a protein stabilizing agent. The kit can further comprise components necessary for detecting the detectable label (e.g., an enzyme or a substrate). The kit can also contain a control sample or a series of control samples which can be assayed and compared to the test sample. Each component of the kit can be enclosed within an individual container and all of the various containers can be within a single package, along with instructions for interpreting the results of the assays performed using the kit.

[2444] B. Pharmacogenomics

[2445] The markers of the invention are also useful as pharmacogenomic markers. As used herein, a “pharmacogenomic marker” is an objective biochemical marker whose expression level correlates with a specific clinical drug response or susceptibility in a patient (see, e.g., McLeod et al. (1999) Eur. J. Cancer 35(12): 1650-1652). The presence or quantity of the pharmacogenomic marker expression is related to the predicted response of the patient and more particularly the patient's disorder to therapy with a specific drug or class of drugs. By assessing the presence or quantity of the expression of one or more pharmacogenomic markers in a patient, a drug therapy which is most appropriate for the patient, or which is predicted to have a greater degree of success, may be selected. For example, based on the presence or quantity of RNA or protein encoded by specific tumor markers in a patient, a drug or course of treatment may be selected that is optimized for the treatment of the specific pervasive developmental disorder likely to be present in the patient. The use of pharmacogenomic markers therefore permits selecting or designing the most appropriate treatment for each patient without trying different drugs or regimes.

[2446] Another aspect of pharmacogenomics deals with genetic conditions that alters the way the body acts on drugs. These pharmacogenetic conditions can occur either as rare defects or as polymorphisms. For example, glucose-6-phosphate dehydrogenase (G6PD) deficiency is a common inherited enzymopathy in which the main clinical complication is hemolysis after ingestion of oxidant drugs (anti-malarials, sulfonamides, analgesics, nitrofurans) and consumption of fava beans.

[2447] As an illustrative embodiment, the activity of drug metabolizing enzymes is a major determinant of both the intensity and duration of drug action. The discovery of genetic polymorphisms of drug metabolizing enzymes (e.g., N-acetyltransferase 2 (NAT 2) and cytochrome P450 enzymes CYP2D6 and CYP2C19) has provided an explanation as to why some patients do not obtain the expected drug effects or show exaggerated drug response and serious toxicity after taking the standard and safe dose of a drug. These polymorphisms are expressed in two phenotypes in the population, the extensive metabolizer (EM) and poor metabolizer (PM). The prevalence of PM is different among different populations. For example, the gene coding for CYP2D6 is highly polymorphic and several mutations have been identified in PM, which all lead to the absence of functional CYP2D6. Poor metabolizers of CYP2D6 and CYP2C19 quite frequently experience exaggerated drug response and side effects when they receive standard doses. If a metabolite is the active therapeutic moiety, a PM will show no therapeutic response, as demonstrated for the analgesic effect of codeine mediated by its CYP2D6-formed metabolite morphine. The other extreme are the so called ultra-rapid metabolizers who do not respond to standard doses. Recently, the molecular basis of ultra-rapid metabolism has been identified to be due to CYP2D6 gene amplification.

[2448] Thus, the level of expression of a marker of the invention in an individual can be determined to thereby select appropriate agent(s) for therapeutic or prophylactic treatment of the individual. In addition, pharmacogenetic studies can be used to apply genotyping of polymorphic alleles encoding drug-metabolizing enzymes to the identification of an individual's drug responsiveness phenotype. This knowledge, when applied to dosing or drug selection, can avoid adverse reactions or therapeutic failure and thus enhance therapeutic or prophylactic efficiency when treating a subject with a modulator of expression of a marker of the invention.

[2449] C. Monitoring Clinical Trials

[2450] Monitoring the influence of agents (e.g., drug compounds) on the level of expression of a marker of the invention can be applied not only in basic drug screening, but also in clinical trials. For example, the effectiveness of an agent to affect marker expression can be monitored in clinical trials of subjects receiving treatment for a pervasive developmental disorder. In a preferred embodiment, the present invention provides a method for monitoring the effectiveness of treatment of a subject with an agent (e.g., an agonist, antagonist, peptidomimetic, protein, peptide, nucleic acid, small molecule, or other drug candidate) comprising the steps of (i) obtaining a pre-administration sample from a subject prior to administration of the agent; (ii) detecting the level of expression of one or more selected markers of the invention in the pre-administration sample; (iii) obtaining one or more post-administration samples from the subject; (iv) detecting the level of expression of the marker(s) in the post-administration samples; (v) comparing the level of expression of the marker(s) in the pre-administration sample with the level of expression of the marker(s) in the post-administration sample or samples; and (vi) altering the administration of the agent to the subject accordingly. For example, increased expression of the marker gene(s) during the course of treatment may indicate ineffective dosage and the desirability of increasing the dosage. Conversely, decreased expression of the marker gene(s) may indicate efficacious treatment and no need to change dosage.

[2451] D. Arrays

[2452] The invention also includes an array comprising a marker of the present invention. The array can be used to assay expression of one or more genes in the array. In one embodiment, the array can be used to assay gene expression in a tissue to ascertain tissue specificity of genes in the array. In this manner, up to about 7600 genes can be simultaneously assayed for expression. This allows a profile to be developed showing a battery of genes specifically expressed in one or more tissues.

[2453] In addition to such qualitative determination, the invention allows the quantitation of gene expression. Thus, not only tissue specificity, but also the level of expression of a battery of genes in the tissue is ascertainable. Thus, genes can be grouped on the basis of their tissue expression per se and level of expression in that tissue. This is useful, for example, in ascertaining the relationship of gene expression between or among tissues. Thus, one tissue can be perturbed and the effect on gene expression in a second tissue can be determined. In this context, the effect of one cell type on another cell type in response to a biological stimulus can be determined. Such a determination is useful, for example, to know the effect of cell-cell interaction at the level of gene expression. If an agent is administered therapeutically to treat one cell type but has an undesirable effect on another cell type, the invention provides an assay to determine the molecular basis of the undesirable effect and thus provides the opportunity to co-administer a counteracting agent or otherwise treat the undesired effect. Similarly, even within a single cell type, undesirable biological effects can be determined at the molecular level. Thus, the effects of an agent on expression of other than the target gene can be ascertained and counteracted.

[2454] In another embodiment, the array can be used to monitor the time course of expression of one or more genes in the array. This can occur in various biological contexts, as disclosed herein, for example development of a pervasive developmental disorder, progression of a pervasive developmental disorder, and processes, such a cellular transformation associated with a pervasive developmental disorder.

[2455] The array is also useful for ascertaining the effect of the expression of a gene on the expression of other genes in the same cell or in different cells. This provides, for example, for a selection of alternate molecular targets for therapeutic intervention if the ultimate or downstream target cannot be regulated.

[2456] The array is also useful for ascertaining differential expression patterns of one or more genes in normal and abnormal cells. This provides a battery of genes that could serve as a molecular target for diagnosis or therapeutic intervention.

### VII. METHODS FOR OBTAINING SAMPLES

[2457] Samples useful in the methods of the invention include any tissue, cell, biopsy, or bodily fluid sample that expresses a marker of the invention. In one embodiment, a sample may be a tissue, a cell, whole blood, serum, plasma, buccal scrape, saliva, cerebrospinal fluid, urine, stool, or bronchoalveolar lavage. In one embodiment, the tissue sample is a pervasive developmental disorder sample, including a brain tissue sample.

[2458] Body samples may be obtained from a subject by a variety of techniques known in the art including, for example, by the use of a biopsy or by scraping or swabbing an area or by using a needle to aspirate bodily fluids. Methods for collecting various body samples are well known in the art.

[2459] Tissue samples suitable for detecting and quantitating a marker of the invention may be fresh, frozen, or fixed according to methods known to one of skill in the art. Suitable tissue samples are preferably sectioned and placed on a microscope slide for further analyses. Alternatively, solid samples, i.e., tissue samples, may be solubilized and/or homogenized and subsequently analyzed as soluble extracts.

[2460] In one embodiment, a freshly obtained biopsy sample is frozen using, for example, liquid nitrogen or difluorodichloromethane. The frozen sample is mounted for sectioning using, for example, OCT, and serially sectioned in a cryostat. The serial sections are collected on a glass microscope slide. For immunohistochemical staining the slides may be coated with, for example, chrome-alum, gelatine or poly-L-lysine to ensure that the sections stick to the slides. In another embodiment, samples are fixed and embedded prior to sectioning. For example, a tissue sample may be fixed in, for example, formalin, serially dehydrated and embedded in, for example, paraffin.

[2461] Once the sample is obtained any method known in the art to be suitable for detecting and quantitating a marker of the invention may be used (either at the nucleic acid or at the protein level). Such methods are well known in the art and include but are not limited to western blots, northern blots, southern blots, immunohistochemistry, ELISA, e.g., amplified ELISA, immunoprecipitation, immunofluorescence, flow cytometry, immunocytochemistry, mass spectrometrometric analyses, e.g., MALDI-TOF and SELDI-TOF, nucleic acid hybridization techniques, nucleic acid reverse transcription methods, and nucleic acid amplification methods. In particular embodiments, the expression of a marker of the invention is detected on a protein level using, for example, antibodies that specifically bind these proteins.

[2462] Samples may need to be modified in order to make a marker of the invention accessible to antibody binding. In a particular aspect of the immunocytochemistry or immunohistochemistry methods, slides may be transferred to a pretreatment buffer and optionally heated to increase antigen accessibility. Heating of the sample in the pretreatment buffer rapidly disrupts the lipid bi-layer of the cells and makes the antigens (may be the case in fresh specimens, but not typically what occurs in fixed specimens) more accessible for antibody binding. The terms “pretreatment buffer” and “preparation buffer” are used interchangeably herein to refer to a buffer that is used to prepare cytology or histology samples for immunostaining, particularly by increasing the accessibility of a marker of the invention for antibody binding. The pretreatment buffer may comprise a pH-specific salt solution, a polymer, a detergent, or a nonionic or anionic surfactant such as, for example, an ethyloxylated anionic or nonionic surfactant, an alkanoate or an alkoxylate or even blends of these surfactants or even the use of a bile salt. The pretreatment buffer may, for example, be a solution of 0.1% to 1% of deoxycholic acid, sodium salt, or a solution of sodium laureth-13-carboxylate (e.g., Sandopan LS) or and ethoxylated anionic complex. In some embodiments, the pretreatment buffer may also be used as a slide storage buffer.

[2463] Any method for making marker proteins of the invention more accessible for antibody binding may be used in the practice of the invention, including the antigen retrieval methods known in the art. See, for example, Bibbo, et al. (2002) Acta. Cytol. 46:25-29; Saqi, et al. (2003) Diagn. Cytopathol. 27:365-370; Bibbo, et al. (2003) Anal. Quant. Cytol. Histol. 25:8-11, the entire contents of each of which are incorporated herein by reference.

[2464] Following pretreatment to increase marker protein accessibility, samples may be blocked using an appropriate blocking agent, e.g., a peroxidase blocking reagent such as hydrogen peroxide. In some embodiments, the samples may be blocked using a protein blocking reagent to prevent non-specific binding of the antibody. The protein blocking reagent may comprise, for example, purified casein. An antibody, particularly a monoclonal or polyclonal antibody that specifically binds to a marker of the invention is then incubated with the sample. One of skill in the art will appreciate that a more accurate prognosis or diagnosis may be obtained in some cases by detecting multiple epitopes on a marker protein of the invention in a patient sample. Therefore, in particular embodiments, at least two antibodies directed to different epitopes of a marker of the invention are used. Where more than one antibody is used, these antibodies may be added to a single sample sequentially as individual antibody reagents or simultaneously as an antibody cocktail. Alternatively, each individual antibody may be added to a separate sample from the same patient, and the resulting data pooled.

[2465] Techniques for detecting antibody binding are well known in the art. Antibody binding to a marker of the invention may be detected through the use of chemical reagents that generate a detectable signal that corresponds to the level of antibody binding and, accordingly, to the level of marker protein expression. In one of the immunohistochemistry or immunocytochemistry methods of the invention, antibody binding is detected through the use of a secondary antibody that is conjugated to a labeled polymer. Examples of labeled polymers include but are not limited to polymer-enzyme conjugates. The enzymes in these complexes are typically used to catalyze the deposition of a chromogen at the antigen-antibody binding site, thereby resulting in cell staining that corresponds to expression level of the biomarker of interest. Enzymes of particular interest include, but are not limited to, horseradish peroxidase (HRP) and alkaline phosphatase (AP).

[2466] In one particular immunohistochemistry or immunocytochemistry method of the invention, antibody binding to a marker of the invention is detected through the use of an HRP-labeled polymer that is conjugated to a secondary antibody. Antibody binding can also be detected through the use of a species-specific probe reagent, which binds to monoclonal or polyclonal antibodies, and a polymer conjugated to HRP, which binds to the species specific probe reagent. Slides are stained for antibody binding using any chromagen, e.g., the chromagen 3,3-diaminobenzidine (DAB), and then counterstained with hematoxylin and, optionally, a bluing agent such as ammonium hydroxide or TBS/Tween-20. Other suitable chromagens include, for example, 3-amino-9-ethylcarbazole (AEC). In some aspects of the invention, slides are reviewed microscopically by a cytotechnologist and/or a pathologist to assess cell staining, e.g., fluorescent staining (i.e., marker expression). Alternatively, samples may be reviewed via automated microscopy or by personnel with the assistance of computer software that facilitates the identification of positive staining cells.

[2467] Detection of antibody binding can be facilitated by coupling the anti-marker antibodies to a detectable substance. Examples of detectable substances include various enzymes, prosthetic groups, fluorescent materials, luminescent materials, bioluminescent materials, and radioactive materials. Examples of suitable enzymes include horseradish peroxidase, alkaline phosphatase, □-galactosidase, or acetylcholinesterase; examples of suitable prosthetic group complexes include streptavidin/biotin and avidin/biotin; examples of suitable fluorescent materials include umbelliferone, fluorescein, fluorescein isothiocyanate, rhodamine, dichlorotriazinylamine fluorescein, dansyl chloride or phycoerythrin; an example of a luminescent material includes luminol; examples of bioluminescent materials include luciferase, luciferin, and aequorin; and examples of suitable radioactive material include ¹²⁵I, ¹³¹I, ³⁵S, ¹⁴C, or ³H.

[2468] In one embodiment of the invention frozen samples are prepared as described above and subsequently stained with antibodies against a marker of the invention diluted to an appropriate concentration using, for example, Tris-buffered saline (TBS). Primary antibodies can be detected by incubating the slides in biotinylated anti-immunoglobulin. This signal can optionally be amplified and visualized using diaminobenzidine precipitation of the antigen. Furthermore, slides can be optionally counterstained with, for example, hematoxylin, to visualize the cells.

[2469] In another embodiment, fixed and embedded samples are stained with antibodies against a marker of the invention and counterstained as described above for frozen sections. In addition, samples may be optionally treated with agents to amplify the signal in order to visualize antibody staining. For example, a peroxidase-catalyzed deposition of biotinyl-tyramide, which in turn is reacted with peroxidase-conjugated streptavidin (Catalyzed Signal Amplification (CSA) System, DAKO, Carpinteria, Calif.) may be used.

[2470] Tissue-based assays (i.e., immunohistochemistry) are the preferred methods of detecting and quantitating a marker of the invention. In one embodiment, the presence or absence of a marker of the invention may be determined by immunohistochemistry. In one embodiment, the immunohistochemical analysis uses low concentrations of an anti-marker antibody such that cells lacking the marker do not stain. In another embodiment, the presence or absence of a marker of the invention is determined using an immunohistochemical method that uses high concentrations of an anti-marker antibody such that cells lacking the marker protein stain heavily. Cells that do not stain contain either mutated marker and fail to produce antigenically recognizable marker protein, or are cells in which the pathways that regulate marker levels are dysregulated, resulting in steady state expression of negligible marker protein.

[2471] One of skill in the art will recognize that the concentration of a particular antibody used to practice the methods of the invention will vary depending on such factors as time for binding, level of specificity of the antibody for a marker of the invention, and method of sample preparation. Moreover, when multiple antibodies are used, the required concentration may be affected by the order in which the antibodies are applied to the sample, e.g., simultaneously as a cocktail or sequentially as individual antibody reagents. Furthermore, the detection chemistry used to visualize antibody binding to a marker of the invention must also be optimized to produce the desired signal to noise ratio.

[2472] In one embodiment of the invention, proteomic methods, e.g., mass spectrometry, are used for detecting and quantitating the marker proteins of the invention. For example, matrix-associated laser desorption/ionization time-of-flight mass spectrometry (MALDI-TOF MS) or surface-enhanced laser desorption/ionization time-of-flight mass spectrometry (SELDI-TOF MS) which involves the application of a biological sample, such as serum, to a protein-binding chip (Wright, G. L., Jr., et al. (2002) Expert Rev Mol Diagn 2:549; Li, J., et al. (2002) Clin Chem 48:1296; Laronga, C., et al. (2003) Dis Markers 19:229; Petricoin, E. F., et al. (2002) 359:572; Adam, B. L., et al. (2002) Cancer Res 62:3609; Tolson, J., et al. (2004) Lab Invest 84:845; Xiao, Z., et al. (2001) Cancer Res 61:6029) can be used to detect and quantitate the PY-Shc and/or p66-Shc proteins. Mass spectrometric methods are described in, for example, U.S. Pat. Nos. 5,622,824, 5,605,798 and 5,547,835, the entire contents of each of which are incorporated herein by reference.

[2473] In other embodiments, the expression of a marker of the invention is detected at the nucleic acid level. Nucleic acid-based techniques for assessing expression are well known in the art and include, for example, determining the level of marker mRNA in a sample from a subject. Many expression detection methods use isolated RNA. Any RNA isolation technique that does not select against the isolation of mRNA can be utilized for the purification of RNA from cells that express a marker of the invention (see, e.g., Ausubel et al., ed., (1987-1999) Current Protocols in Molecular Biology (John Wiley & Sons, New York). Additionally, large numbers of tissue samples can readily be processed using techniques well known to those of skill in the art, such as, for example, the single-step RNA isolation process of Chomczynski (1989, U.S. Pat. No. 4,843,155).

[2474] The term “probe” refers to any molecule that is capable of selectively binding to a marker of the invention, for example, a nucleotide transcript and/or protein. Probes can be synthesized by one of skill in the art, or derived from appropriate biological preparations. Probes may be specifically designed to be labeled. Examples of molecules that can be utilized as probes include, but are not limited to, RNA, DNA, proteins, antibodies, and organic molecules.

[2475] Isolated mRNA can be used in hybridization or amplification assays that include, but are not limited to, Southern or Northern analyses, polymerase chain reaction analyses and probe arrays. One method for the detection of mRNA levels involves contacting the isolated mRNA with a nucleic acid molecule (probe) that can hybridize to the marker mRNA. The nucleic acid probe can be, for example, a full-length cDNA, or a portion thereof, such as an oligonucleotide of at least 7, 15, 30, 50, 100, 250 or 500 nucleotides in length and sufficient to specifically hybridize under stringent conditions to marker genomic DNA.

[2476] In one embodiment, the mRNA is immobilized on a solid surface and contacted with a probe, for example by running the isolated mRNA on an agarose gel and transferring the mRNA from the gel to a membrane, such as nitrocellulose. In an alternative embodiment, the probe(s) are immobilized on a solid surface and the mRNA is contacted with the probe(s), for example, in an Affymetrix gene chip array. A skilled artisan can readily adapt known mRNA detection methods for use in detecting the level of marker mRNA.

[2477] An alternative method for determining the level of marker mRNA in a sample involves the process of nucleic acid amplification, e.g., by RT-PCR (the experimental embodiment set forth in Mullis, 1987, U.S. Pat. No. 4,683,202), ligase chain reaction (Barany (1991) Proc. Natl. Acad. Sci. USA 88:189-193), self sustained sequence replication (Guatelli et al. (1990) Proc. Natl. Acad. Sci. USA 87:1874-1878), transcriptional amplification system (Kwoh et al. (1989) Proc. Natl. Acad. Sci. USA 86:1173-1177), Q-Beta Replicase (Lizardi et al. (1988) Bio/Technology 6:1197), rolling circle replication (Lizardi et al., U.S. Pat. No. 5,854,033) or any other nucleic acid amplification method, followed by the detection of the amplified molecules using techniques well known to those of skill in the art. These detection schemes are especially useful for the detection of nucleic acid molecules if such molecules are present in very low numbers. In particular aspects of the invention, marker expression is assessed by quantitative fluorogenic RT-PCR (i.e., the TaqMan™ System). Such methods typically utilize pairs of oligonucleotide primers that are specific for a marker of the invention. Methods for designing oligonucleotide primers specific for a known sequence are well known in the art.

[2478] The expression levels of a marker of the invention may be monitored using a membrane blot (such as used in hybridization analysis such as Northern, Southern, dot, and the like), or microwells, sample tubes, gels, beads or fibers (or any solid support comprising bound nucleic acids). See U.S. Pat. Nos. 5,770,722, 5,874,219, 5,744,305, 5,677,195 and 5,445,934, which are incorporated herein by reference. The detection of marker expression may also comprise using nucleic acid probes in solution.

[2479] In one embodiment of the invention, microarrays are used to detect the expression of a marker of the invention. Microarrays are particularly well suited for this purpose because of the reproducibility between different experiments. DNA microarrays provide one method for the simultaneous measurement of the expression levels of large numbers of genes. Each array consists of a reproducible pattern of capture probes attached to a solid support. Labeled RNA or DNA is hybridized to complementary probes on the array and then detected by laser scanning. Hybridization intensities for each probe on the array are determined and converted to a quantitative value representing relative gene expression levels. See, U.S. Pat. Nos. 6,040,138, 5,800,992 and 6,020,135, 6,033,860, and 6,344,316, which are incorporated herein by reference. High-density oligonucleotide arrays are particularly useful for determining the gene expression profile for a large number of RNA's in a sample.

[2480] The amounts of phosphorylated marker, and/or a mathematical relationship of the amounts of a marker of the invention may be used to calculate the risk of recurrence of a pervasive developmental disorder in a subject being treated for a pervasive developmental disorder, the survival of a subject being treated for a pervasive developmental disorder, whether a pervasive developmental disorder is aggressive, the efficacy of a treatment regimen for treating a pervasive developmentaldisorder, and the like, using the methods of the invention, which may include methods of regression analysis known to one of skill in the art. For example, suitable regression models include, but are not limited to CART (e.g., Hill, T, and Lewicki, P. (2006) “STATISTICS Methods and Applications” StatSoft, Tulsa, Okla.), Cox (e.g., www.evidence-based-medicine.co.uk), exponential, normal and log normal (e.g., www.obgyn.cam.ac.uk/mrg/statsbook/stsurvan.html), logistic (e.g., www.en.wikipedia.org/wiki/Logistic_regression or http://faculty.chass.ncsu.edu/garson/PA765/logistic.htm), parametric, non-parametric, semi-parametric (e.g., www.socserv.mcmaster.ca/jfox/Books/Companion), linear (e.g., www.en.wikipedia.org/wiki/Linear_regression or http://www.curvefit.com/linear_regression.htm), or additive (e.g., www.en.wikipedia.org/wiki/Generalized_additive_model or http://support.sas.com/rnd/app/da/new/dagam.html).

[2481] In one embodiment, a regression analysis includes the amounts of phosphorylated marker. In another embodiment, a regression analysis includes a marker mathematical relationship. In yet another embodiment, a regression analysis of the amounts of phosphorylated marker, and/or a marker mathematical relationship may include additional clinical and/or molecular co-variates. Such clinical co-variates include, but are not limited to, nodal status, tumor stage, tumor grade, tumor size, treatment regime, e.g., chemotherapy and/or radiation therapy, clinical outcome (e.g., relapse, disease-specific survival, therapy failure), and/or clinical outcome as a function of time after diagnosis, time after initiation of therapy, and/or time after completion of treatment.

[2482] In another embodiment, the amounts of phosphorylated marker, and/or a mathematical relationship of the amounts of a marker may be used to calculate the risk of recurrence of an oncologic disorder in a subject being treated for an oncologic disorder, the survival of a subject being treated for an oncologic disorder, whether an oncologic disorder is aggressive, the efficacy of a treatment regimen for treating an oncologic disorder, and the like, using the methods of the invention, which may include methods of regression analysis known to one of skill in the art. For example, suitable regression models include, but are not limited to CART (e.g., Hill, T, and Lewicki, P. (2006) “STATISTICS Methods and Applications” StatSoft, Tulsa, Okla.), Cox (e.g., www.evidence-based-medicine.co.uk), exponential, normal and log normal (e.g., www.obgyn.cam.ac.uk/mrg/statsbook/stsurvan.html), logistic (e.g., www.en.wikipedia.org/wiki/Logistic_regression or http://faculty.chass.ncsu.edu/garson/PA765/logistic.htm), parametric, non-parametric, semi-parametric (e.g., www.socserv.mcmaster.ca/jfox/Books/Companion), linear (e.g., www.en.wikipedia.org/wiki/Linear_regression or http://www.curvefit.com/linear_regression.htm), or additive (e.g., www.en.wikipedia.org/wiki/Generalized_additive_model or http://support.sas.com/rnd/app/da/new/dagam.html).

[2483] In one embodiment, a regression analysis includes the amounts of phosphorylated marker. In another embodiment, a regression analysis includes a marker mathematical relationship. In yet another embodiment, a regression analysis of the amounts of phosphorylated marker, and/or a marker mathematical relationship may include additional clinical and/or molecular co-variates. Such clinical co-variates include, but are not limited to, nodal status, tumor stage, tumor grade, tumor size, treatment regime, e.g., chemotherapy and/or radiation therapy, clinical outcome (e.g., relapse, disease-specific survival, therapy failure), and/or clinical outcome as a function of time after diagnosis, time after initiation of therapy, and/or time after completion of treatment.

### VIII. KITS

[2484] The invention also provides compositions and kits for prognosing a disease or disorder, recurrence of a disorder, or survival of a subject being treated for a disorder (e.g., a pervasive developmental disorder, such as autism and/or Alzheimer's disorder). These kits include one or more of the following: a detectable antibody that specifically binds to a marker of the invention, a detectable nucleic acid that specifically binds to a marker of the invention, reagents for obtaining and/or preparing subject tissue samples for staining, and instructions for use.

[2485] The kits of the invention may optionally comprise additional components useful for performing the methods of the invention. By way of example, the kits may comprise fluids (e.g., SSC buffer) suitable for annealing complementary nucleic acids or for binding an antibody with a protein with which it specifically binds, one or more sample compartments, an instructional material which describes performance of a method of the invention and tissue specific controls/standards.

### IX. SCREENING ASSAYS

[2486] Targets of the invention include, but are not limited to, the genes and proteins described herein. Screening assays useful for identifying modulators of identified markers are described below.

[2487] The invention also provides methods (also referred to herein as “screening assays”) for identifying modulators, i.e., candidate or test compounds or agents (e.g., proteins, peptides, peptidomimetics, peptoids, small molecules or other drugs), which modulate the state of the diseased cell by modulating the expression and/or activity of a marker of the invention. Such assays typically comprise a reaction between a marker of the invention and one or more assay components. The other components may be either the test compound itself, or a combination of test compounds and a natural binding partner of a marker of the invention. Compounds identified via assays such as those described herein may be useful, for example, for modulating, e.g., inhibiting, ameliorating, treating, or preventing the disease.

[2488] The test compounds used in the screening assays of the present invention may be obtained from any available source, including systematic libraries of natural and/or synthetic compounds. Test compounds may also be obtained by any of the numerous approaches in combinatorial library methods known in the art, including: biological libraries; peptoid libraries (libraries of molecules having the functionalities of peptides, but with a novel, non-peptide backbone which are resistant to enzymatic degradation but which nevertheless remain bioactive; see, e.g., Zuckermann et al., 1994, J. Med. Chem. 37:2678-85); spatially addressable parallel solid phase or solution phase libraries; synthetic library methods requiring deconvolution; the ‘one-bead one-compound’ library method; and synthetic library methods using affinity chromatography selection. The biological library and peptoid library approaches are limited to peptide libraries, while the other four approaches are applicable to peptide, non-peptide oligomer or small molecule libraries of compounds (Lam, 1997, Anticancer Drug Des. 12:145).

[2489] Examples of methods for the synthesis of molecular libraries can be found in the art, for example in: DeWitt et al. (1993) Proc. Natl. Acad. Sci. U.S.A. 90:6909; Erb et al. (1994) Proc. Natl. Acad. Sci. USA 91:11422; Zuckermann et al. (1994). J. Med. Chem. 37:2678; Cho et al. (1993) Science 261:1303; Carrell et al. (1994) Angew. Chem. Int. Ed. Engl. 33:2059; Carell et al. (1994) Angew. Chem. Int. Ed. Engl. 33:2061; and in Gallop et al. (1994) J. Med. Chem. 37:1233.

[2490] Libraries of compounds may be presented in solution (e.g., Houghten, 1992, Biotechniques 13:412-421), or on beads (Lam, 1991, Nature 354:82-84), chips (Fodor, 1993, Nature 364:555-556), bacteria and/or spores, (Ladner, U.S. Pat. No. 5,223,409), plasmids (Cull et al, 1992, Proc Natl Acad Sci USA 89:1865-1869) or on phage (Scott and Smith, 1990, Science 249:386-390; Devlin, 1990, Science 249:404-406; Cwirla et al, 1990, Proc. Natl. Acad. Sci. 87:6378-6382; Felici, 1991, J. Mol. Biol. 222:301-310; Ladner, supra.).

[2491] The screening methods of the invention comprise contacting a cell, e.g., a diseased cell, with a test compound and determining the ability of the test compound to modulate the expression and/or activity of a marker of the invention in the cell. The expression and/or activity of a marker of the invention can be determined as described herein.

[2492] In another embodiment, the invention provides assays for screening candidate or test compounds which are substrates of a marker of the invention or biologically active portions thereof. In yet another embodiment, the invention provides assays for screening candidate or test compounds which bind to a marker of the invention or biologically active portions thereof. Determining the ability of the test compound to directly bind to a marker can be accomplished, for example, by coupling the compound with a radioisotope or enzymatic label such that binding of the compound to the marker can be determined by detecting the labeled marker compound in a complex. For example, compounds (e.g., marker substrates) can be labeled with ¹³¹I, ¹²⁵I, ³⁵S, ¹⁴C, or ³H, either directly or indirectly, and the radioisotope detected by direct counting of radioemission or by scintillation counting. Alternatively, assay components can be enzymatically labeled with, for example, horseradish peroxidase, alkaline phosphatase, or luciferase, and the enzymatic label detected by determination of conversion of an appropriate substrate to product.

[2493] This invention further pertains to novel agents identified by the above-described screening assays. Accordingly, it is within the scope of this invention to further use an agent identified as described herein in an appropriate animal model. For example, an agent capable of modulating the expression and/or activity of a marker of the invention identified as described herein can be used in an animal model to determine the efficacy, toxicity, or side effects of treatment with such an agent. Alternatively, an agent identified as described herein can be used in an animal model to determine the mechanism of action of such an agent. Furthermore, this invention pertains to uses of novel agents identified by the above-described screening assays for treatment as described above.

### X. TREATMENT OF DISEASE STATES

[2494] The present invention provides methods for treating a pervasive developmental disorder, or symptoms of a pervasive developmental disorder, by administering to a subject (e.g., a mammal, e.g., a human) in need thereof one or more of the proteins listed in Tables 2-6. In one embodiment, the pervasive developmental disorder is autism. In one embodiment, the pervasive developmental disorder is Alzheimer's disease. In other embodiments, the pervasive developmental disorder is any one of the disorders described herein.

[2495] In one aspect, the invention provides a method for treating, alleviating symptoms of, inhibiting progression of, or preventing a pervasive developmental disorder in a subject, the method comprising administering to the subject in need thereof a therapeutically effective amount of a pharmaceutical composition comprising one or more of the markers listed in Tables 2-6. In one embodiment, the marker is a protein or fragment thereof. In one embodiment, the marker is a nucleic acid, e.g., RNA or DNA, encoding or expressing a protein marker or fragment thereof. The markers suitable for such a method are further described in detail herein.

[2496] In another aspect, the invention provides a method for treating, alleviating symptoms of, inhibiting progression of, or preventing a pervasive developmental disorder in a subject, the method comprising administering to the subject in need thereof a therapeutically effective amount of a pharmaceutical composition comprising an agent that modulates expression or activity of one or more of the markers listed in Tables 2-6.

[2497] In one embodiment, the agent that modulates expression or activity of the one or more of the markers listed in Tables 2-6 is identified using any one of the screening assays described herein. In one embodiment, the agent inhibits expression or activity of one or more of the markers listed in Tables 2-6. In one embodiment, the agent augments expression or activity of one or more of the markers listed in Tables 2-6.

[2498] The invention further provides a method for assessing the efficacy of a treatment regimen for treating a pervasive developmental disorder or symptoms of a pervasive developmental disorder in a subject, the method comprising: (1) determining a level of expression of one or more of the markers listed in Tables 2-6 present in a first biological sample obtained from the subject prior to administering at least a portion of the treatment regimen to the subject, using reagents that transform the markers such that the markers can be detected; (2) determining a level of expression of one or more of the markers listed in Tables 2-6 present in a second biological sample obtained from the subject following administration of at least a portion of the treatment regimen to the subject, using reagents that transform the markers such that the markers can be detected; (3) comparing the level of expression of one or more markers listed in Tables 2-6 present in a first sample obtained from the subject prior to administering at least a portion of the treatment regimen to the subject with the level of expression of the one or more markers present in a second sample obtained from the subject following administration of at least a portion of the treatment regimen; and (4) assessing whether the treatment regimen is efficacious for treating the pervasive developmental disorder or symptoms of the pervasive developmental disorder.

[2499] In one embodiment, a modulation in the level of expression of the one or more markers in the second sample as compared to the first sample is an indication that the treatment regimen is efficacious for treating the pervasive developmental disorder or symptoms of the pervasive developmental disorder in the subject. In one embodiment, a similar level of expression of the one or more markers in the second sample as compared to the first sample is an indication that the treatment regimen is non-efficacious for treating the pervasive developmental disorder or symptoms of the pervasive developmental disorder in the subject.

[2500] In some embodiments, modulation of the level of expression in the second sample towards normal or control levels of expression, e.g., closer to normal or control levels of expression than that of the levels of expression in the first sample, is an indication that the treatment regimen is efficacious for treating the pervasive developmental disorder or symptoms of the pervasive developmental disorder in the subject.

[2501] In one embodiment, the subject is undergoing a treatment for the pervasive developmental disorder. In some embodiments, the method further comprises continuing administration of the treatment regimen to the subject for whom the treatment regimen is determined to be efficacious for treating the pervasive developmental disorder or symptoms of the pervasive developmental disorder, and/or discontinuing administration of the treatment regimen to the subject for whom the treatment regimen is determined to be non-efficacious for treating the pervasive developmental disorder or symptoms of the pervasive developmental disorder.

[2502] In another aspect, the invention provides a method of identifying a compound for treating a pervasive developmental disorder or symptoms of pervasive developmental disorders in a subject, the method comprising: (1) contacting a biological sample with a test compound; (2) determining the level of expression and/or activity of one or more markers listed in Tables 2-6 present in the biological sample; (3) comparing the level of expression and/or activity of the one or more markers in the biological sample with that of a control sample not contacted by the test compound; and (4) selecting a test compound that modulates the level of expression and/or activity of the one or more markers in the biological sample, thereby identifying a compound for treating a pervasive developmental disorder or symptoms of a pervasive developmental disorder in a subject.

[2503] In one embodiment the biological sample is obtained from a subject suffering from a pervasive developmental disorder or symptoms of a pervasive developmental disorder. In one embodiment the subject is a human. In one embodiment, the biological sample is a tissue or a biological fluid from the subject, e.g., a subject suffering from a pervasive developmental disorder or symptoms of a pervasive developmental disorder. In one embodiment, the biological sample comprises cells, e.g., primary cells from a subject or immortalized cells for use in in vitro assays.

[2504] In one embodiment, the test compound up-modulates the expression and/or activity of one or more markers listed in Tables 2-6. In one embodiment, the test compound down-modulates the expression and/or activity of one or markers listed in Tables 2-6. In one embodiment, the test compound modulates the expression and/or activity of one or more markers listed in Tables 2-6 towards, or to a level similar or identical to, the level of expression of a control sample.

[2505] In another aspect, the invention provides a method of treating a subject having a pervasive developmental disorder with a treatment regimen, the method comprising the steps of: selecting a subject exhibiting a modulated level of expression of one or more of the markers listed in Tables 2-6 as compared to a level of expression of a control marker in response to the treatment regimen; and administering a therapeutically effective amount of the treatment regimen to the subject.

[2506] This invention is further illustrated by the following examples which should not be construed as limiting. The contents of all references and published patents and patent applications cited throughout the application are hereby incorporated by reference.

### EXEMPLIFICATION OF THE INVENTION

[2507] This invention is further illustrated by the following examples which should not be construed as limiting. The contents of all references and published patents and patent applications cited throughout the application are hereby incorporated by reference.

### Example 1

### Proteins Identified as Uniquely Up or Down Regulated in Autism vs. Normal Samples

[2508] Studies were performed using the above described Platform Technology with lymphoblast cells from autism patients and normal unafflicted parents or siblings of the autism patients to identify proteins which are uniquely upregulated or downregulated in the autism disease state. Lymphoblast cell samples from four autism patients and five unafflicted controls (see FIG. 9) were prepared by using the cell lines obtained from Coriell Cell Repositories (403 Haddon Avenue Camden, N.J. 08103). The results of these studies were analyzed using data processing within the Platform Technology as described above.

[2509] The results of these studies identified proteins such as SPTAN1, HSP90B1, GLUD1, and CORO1A as global differential network hubs/nodes which are uniquely up or down regulated in samples from Autism patients compared to samples from normal unafflicted parents or siblings of the autism patients (see FIG. 10). Moreover, the studies identified the following proteins within the network of SPTAN1, HSP90B1, GLUD1, and CORO1A, as uniquely up or down regulated in samples from Autism patients comparing to samples from normal parents or siblings of the autism patients.

TABLE 2
SPTAN1, HSP90B1, SERPINB9, LETM1, CUX1, EIF3G, LCP1,
CORO1A, ANXA6, CAPG, APMAP, COTL1, FKBP4, DIABLO,
HLA-DRA, HLA-DQB1, FKBP4, IGLC1, TXNDC5, GLUD1, PCNA,
PDIA4, and MGEA5

[2510] These results indicated that proteins such as such as SPTAN1, HSP90B1, SERPINB9, LETM1, CUX1, EIF3G, LCP1, CORO1A, ANXA6, CAPG, APMAP, COTL1, FKBP4, DIABLO, HLA-DRA, HLA-DQB1, FKBP4, IGLC1, TXNDC5, GLUD1, PCNA, PDIA4, and MGEA5 can serve as markers for diagnosing a pervasive developmental disorder, e.g., autism, for identifying a predisposition or risk for developing a pervasive developmental disorder, e.g., autism, and as targets useful for developing pharmaceutical treatments of a pervasive developmental disorder, e.g., autism.

[2511] Spectrin A2 (SPTAN1) was identified as one of the molecular entities influenced by autism. SPTAN1 is a protein expressed in non-erythrocytic cells, which is also know as “Spectrin A2.” Mutation of SPTAN1 is linked to West Syndrome such as hypomyelination, quadriplegia and development delay. Aberrant spectrin characteristics are evident in brain and lymphoblastic cells of Autism patients. The loci of SPTAN1 is close to the loci of TSC1. Expression of SPTAN1 influences T-cell maturation and CD4/CD8 ratios. SPTAN1 has a characteristic aggregation pattern in T-cell activation.

[2512] Coronin 1A (CORO1A) was identified as a hub in autism network. CORO1A is an actin binding protein which is involved in signal transduction, apoptosis, and gene regulation patherways. CORO1A is a key player in T-cell survical activation and migration. Mutation of CORO1A is associated with T-cell egress from thymus resulting in peripheral deficiency. Mutation of CORO1A is associated with severe combined immunodeficiency and ADHD.

[2513] GLUD 1 is a mitochondrial specific protein which plays a key role in ammonia detoxification. Based on the identification of GLUD1 as being modulated in samples from autism patients, increased ammonia levels observed in autism plasma may be due to mitochondrial dysfunction, e.g., GLUD1 dysfunction. Activity of GLUD1 is influenced by ATP levels.

[2514] HSP90B1 is a ER specific heat shock protein which is a GRP member. HSP90B1 is a master chaperone of integrins and is a T & B lymphopoiesis regulator. HSP90B1 interacts with genes reported to be associated with autism.

### Example 2

### Molecular Entities Driven by Disease State and Identified as Common to Autism and Alzheimer's Disease

[2515] Studies were performed using the above described Platform Technology with lymphoblast cells from autism or Alzheimer's disease patients and from normal, control individuals, e.g., unafflicted parents or siblings of the Autism and/or Alzheimer's patients, to identify proteins which are uniquely upregulated or downregulated as compared to controls and also common to both autism and Alzheimer patients. Lymphoblast cell samples from four autism patients and five unafflicted controls (see FIG. 9), and from four Alzheimer patients and four healthy controls (matching age and gender), were prepared by using the cell lines obtained from Coriell Cell Repositories (403 Haddon Avenue Camden, N.J. 08103). The results of these studies were analyzed using data processing within the Platform Technology as described above.

[2516] The results of these studies identified that the following proteins were commonly modulated, e.g., upregulated or downregulated, in samples from both Autism and Alzheimer's disease patients as compared to samples from normal, unafflicted individuals (e.g., unafflicted parents or siblings of the autism or Alzheimer's patients). See FIG. 11.

TABLE 3
HBA2, AHSG, LMNA, P4HB, TXNDC5, VIM, DDX39A, ZNF207,
EIF3G, HPRT1, PEA15, IGHM, MX1, ETFB, EIF3L, TPM4, GTF2I,
TUBA4A, RPS15, HLA-A, TXNL1, PSME1, TSN, FARSA,
MTHFD1, and HSPH1

[2517] These results indicated that proteins such as such as HBA2, AHSG, LMNA, P4HB, TXNDC5, VIM, DDX39A, ZNF207, EIF3G, HPRT1, PEA15, IGHM, MX1, ETFB, EIF3L, TPM4, GTF2I, TUBA4A, RPS15, HLA-A, TXNL1, PSME1, TSN, FARSA, MTHFD1, and HSPH1 can serve as markers for diagnosing a pervasive developmental disorder, such as autism and/or Alzheimer's disease, for identifying a predisposition or risk for developing a pervasive developmental disorder, e.g., autism and or Alzheimer's disease, and as targets useful for developing pharmaceutical treatment of a pervasive developmental disorder, such as autism and/or Alzheimer's disease.

### Example 3

### Novel Autism Spectrum Disorders (ASD) Biomarkers Identified Using the Interrogative Biology Discovery Platform

[2518] Applicants have employed herein a novel approach combining the power of cell biology and multi-omics platforms in an Interrogative Discovery Platform Technology in order to identify novel biomarkers for Autism Spectrum disorder, e.g., autism. A cell model system for Autism Spectrum Disorder, and in particular for autism, was developed and employed, which comprised Lymphoblast cell lines obtained from patients used as cell model to represent Autism disorder. These cells were treated with or without the MIMs to capture the pathological proteome changes unique to a pervasive developmental disorder, e.g., autism. A 2D-nanoLC-MSMS workflow was developed to profile and relatively quantify the cellular and secreted peptides/proteins. While only proteomic analysis was carried out in this example, multiple data output may readily be employed and analyzed in the platform technology, including data from flow cytometry, cell-based assays (e.g. mitochodria ATP and ROS assays) and functional genomic platforms (e.g. single-nucleotide polymorphism (SNP) data), to provide insightful biological readout. All data obtained in the present example (i.e., proteomic data) were subjected to a AI based REFS™ informatics platform in an effort to study congruent data trends with in vitro, in vivo, and in silico modeling. By using this process, a molecular fingerprint was developed of a cellular signaling network associated with the disease phenotype, thereby providing insight into the mechanisms that dictate the molecular alterations that lead to disease (e.g., a pervasive development disorder) onset and progression. Using this approach, several novel biomarkers have been identified from the causal network. In addition, using cellular functional readouts such as mitochondrial ATP, bioenergetics, ROS etc., markers that drive pathophysiological cellular behavior were determined. Taken together, the methodologies described herein represent a solid foundation for the identification of biomarkers useful for diagnoses and patient stratification in Autism Spectrum Disorder (ASD).

[2519] An example of the specific experimental approach employed is depicted in FIG. 8. Briefly, lymphoblasts were sampled from autism patients and normal unafflicted parents or siblings. Lymphoblast cell samples from four autism patients and five unafflicted controls (see FIG. 9) were prepared by using the cell lines obtained from Coriell Cell Repositories (403 Haddon Avenue Camden, N.J. 08103). An Omics analysis, e.g. 2D-nanoLC-MSMS proteomics analysis, was performed on the samples. Multi-Omics sample analysis readout were inputted into the AI based REFS informatics platform as described above. Differential interactome network output has identified biomarkers which are uniquely expressed or modulated/desregulated in the autism disease state.

[2520] One exemplary simulated differential delta network which compares the autism patients to normal unafflicted parents or siblings is shown in FIG. 12. This differential network is a re-constructed network based exclusively on the data collected, i.e., no previous biological knowledge was used to create the network. In the network, three critical “hubs” or “modulators” of ASD pathophysiology were identified and are highlighted in FIG. 12.

[2521] For the first hub (as shown in FIG. 13), the parent node, Spectrin A2 (SPTAN1), plays a role in cell signaling and peripheral nerve myelination. The dominant negative mutation of SPTAN1 causes western syndrome, with cerebral hypomyelination, poor visual attention, spastic quadriplegia, and developmental delay. The characteristic aberrant spectrin was reported in brain and lymphoblast cells. No literature has reported on SPTAN1's role in autism. However, a role for myelination in autism was previously reported. For one of the child nodes, Syntaxin-6 (STX6), there have been no reports linking STX6 to autism. An STX6 mutation was reported to be involved in toxin absorption and to be involved in another neurodegenerative disease, Progressive supranuclear (PSP). Child node Integrin beta 7 (ITGB7) was reported to be differentially expressed in autistic children compared to their normal siblings (see Hu et al. BMC Genomics 2006; Szatmari et al., Nat Genet. 2007). For neighboring node SERPINB9, which shared multiple child nodes with Serpin peptidase inhibitor, clade (SPTAN1), a microarray study reported that down-regulation of this gene expression is associated with autistic patients compared to their normal siblings (Hu et al. Autism Res. 2009).

[2522] The second hub, Glutamate dehydogenase 1 (GLUD1), is the parent node shown in FIG. 14. GLUD1 is a motochondria matrix enzyme and it plays a key role in nitrogen and glutamate metabolism, and in energy homeostasis in the brain. Upregulation of GLUD1 has been reported in autistic children in early onset stage (Gregg et al., Genomics. 2008). Increased ammonia levels in autism plasma are suggested to be due to mitochondrial dysfunction. The child nodes of GLUD1, EIF3B and RPL3, have both been linked to the autistic phenotype by CNV analysis. The upregulation of GLUD1's neighboring node Septin 2 (SEPT2) has also been detected in early onset autism (Gregg et al., Genomics. 2008). GLUD1's child nodes EIF3B and RPL3 are genetically associated to the autistic phenotype by CNV analysis.

[2523] The third hub, Coronin-1A (CORO1A), is the parent node shown in FIG. 15. CORO1A is involved in signal transduction, miotochondria apoptosis, T-cell mediated immunity and gene regulation. Mutation of CORO1A is associated with severe combined immunodeficiency and ADHD. The child node Coproporphyrinogen III oxidase (CPDX) is a mitochondria inner membrane enzyme. CPDX may be associated with mitochondria respiratory chain disorder. Disregulation of CPDX is linked to exaggerated porphyrin excretion as observed among some autistic patients. Urine porphyrin levels are used as the indicator for mercury exposure as urinary porphyrin positively correlates to mercury exposure.

[2524] The results of these studies identified inlcuding SPTAN1, GLUD1, and CORO1A as global differential network hubs/nodes which are uniquely expressed or modulated/disregulated in samples from Autism patients as compared to samples from normal unafflicted parents or siblings of the autism patients. Moreover, the studies identified the following additional listed in Tables 4-6 below within the network of SPTAN1, GLUD1, and CORO1A, respectively, as uniquely expressed or modulated/disregulated in samples from Autism patients as compared to samples from normal parents or siblings of the autism patients.

TABLE 4
SPTAN1, STX6, ITGB7, CPSF6, DDX6, SERPINB9, PSMA2, SMC4

TABLE 5
GLUD1, SEPT2, OSBP, AHSA1, ERAP1, FKBP4, RPL13, PDCL3,
EIF3B, AP1S1

TABLE 6
CORO1A, YWHAG, HNRNPM, ERP44, CPOX, EIF4A2, SEC61A1,
TJP2, LETM1, GET4

[2525] These results indicated that proteins such as SPTAN1, STX6, ITGB7, CPSF6, DDX6, SERPINB9, PSMA2, SMC4, GLUD1, SEPT2, OSBP, AHSA1, ERAP1, FKBP4, RPL13, PDCL3, EIF3B, AP1S1, CORO1A, YWHAG, HNRNPM, ERP44, CPDX, EIF4A2, SEC61A1, TJP2, LETM1, and GET4 can serve as markers for diagnosing a pervasive developmental disorder, e.g., autism or autism spectrum disorder, for identifying a predisposition or risk for developing a pervasive developmental disorder, e.g., autism or Alzheimer's disease, and as targets useful for developing pharmaceutical treatments of a pervasive developmental disorder, e.g., autism or autism spectrum disorder.

[2526] In conclusion, the Interrogative Discovery Platform Technology used in this example is exclusively data driven. The AI-based network engineering enables the complex data mining to understand interactions and causality. Interrogative “omic” based platform robustly infers cellular intelligence. The fact that some of the markers identified in this example have been previously reported to associate with autism validates that this Platform Technology, and the cell models used in the Platform Technology for autism, provide a solid foundation for the identification of biomarkers useful for the diagnosis and patient stratification under the spectrum of autism. The AI-based network engineering approach to data mining employed in the platform technology as a means to infer causality results in actionable biological intelligence. The exemplary autism causal interaction networks for autism shown in FIGS. 12-15 identified several novel biomarkers and potential therapeutic targets for autism. The interrogative discovery platform technology described herein allows for an enhanced understanding of pathophysiology and can thereby drive the identification of therapeutics and biomarkers for pervasive development disorders, including Autism Spectrum Disorder.

### EQUIVALENTS

[2527] Those skilled in the art will recognize, or be able to ascertain using no more than routine experimentation, many equivalents to the specific embodiments and methods described herein. Such equivalents are intended to be encompassed by the scope of the following claims.

The application's sequence listing, which the Patent Office published only in electronic form, follows.

SEQUENCE LISTING (246 sequences)

SEQ ID NO: 1 - DNA, 1429 bp, Homo sapiens
ggaagttaaggaggggagggggtggagggaaaagcaagccaggaggtgcttgcggccgcttctagtagtttccaggcgctgccgggcggctggcactaagcggtcctgaggctgtggctacggctgctccggagctggtggcgccgcgataggagagccgatggccaagtggggtgagggagacccacgctggatcgtggaggagcgggcggacgccaccaacgtcaacaactggcactggacggagagagatgcttcaaattggtccacggataagctgaaaacactgttcctggcagtgcaggttcaaaatgaagaaggcaagtgtgaggtgacggaagtgagtaagcttgatggagaggcatccattaacaatcgcaaagggaaacttatcttcttttatgaatggagcgtcaaactaaactggacaggtacttctaagtcaggagtacaatacaaaggacatgtggagatccccaatttgtctgatgaaaacagcgtggatgaagtggagattagtgtgagccttgccaaagatgagcctgacacaaatctcgtggccttaatgaaggaagaaggggtgaaacttctaagagaagcaatgggaatttacatcagcaccctcaaaacagagttcacccagggcatgatcttacctacaatgaatggagagtcagtagacccagtggggcagccagcactgaaaactgaggagcgcaaggctaagcctgctccttcaaaaacccaggccagacctgttggagtcaaaatccccacttgtaagatcactcttaaggaaaccttcctgacgtcaccagaggagctctatagagtgtttaccacccaagagctggtgcaggcctttacccatgctcctgcaacattagaagcagacagaggtggaaagttccacatggtagatggcaacgtctctggggaatttactgatctggtccctgagaaacatattgtgatgaagtggaggtttaaatcttggccagagggacactttgccaccatcaccttgaccttcatcgacaagaacggagagactgagctgtgcatggaaggtcgaggcatccctgctcctgaggaagagcggacgcgacagggctggcagcggtactactttgagggcattaaacagacctttggctatggcgcacgcttattttagggccagcggcaggggactccagcctgctggacacttcagtccagctctctcctgactggggcttgcgactcacaggattgcatcgtcccagctgctaacttggggccggggcccctcccttccacatataccttgggtttgtgcatgttttctgctgggtgggttcagagggcaatttctcttttatgtgtacatatgctaaataaacataatttaaaaaacaaaaaaaaaaaaaaaaaaaaaaaaaaaaaa

SEQ ID NO: 2 - protein, 338 aa, Homo sapiens
MAKWGEGDPRWIVEERADATNVNNWHWTERDASNWSTDKLKTLFLAVQVQNEEGKCEVTEVSKLDGEASINNRKGKLIFFYEWSVKLNWTGTSKSGVQYKGHVEIPNLSDENSVDEVEISVSLAKDEPDTNLVALMKEEGVKLLREAMGIYISTLKTEFTQGMILPTMNGESVDPVGQPALKTEERKAKPAPSKTQARPVGVKIPTCKITLKETFLTSPEELYRVFTTQELVQAFTHAPATLEADRGGKFHMVDGNVSGEFTDLVPEKHIVMKWRFKSWPEGHFATITLTFIDKNGETELCMEGRGIPAPEEERTRQGWQRYYFEGIKQTFGYGARLF

SEQ ID NO: 3 - DNA, 1594 bp, Homo sapiens
tacctttcccagcagagcacctgggttggtcccgaagcctccaaccacctgcacgcctgccagggcctctctggggcagccatgaagtccctcgtcctgctcctttgtcttgctcagctctggggctgccactcagccccacatggcccagggctgatttatagacaaccgaactgcgatgatccagaaactgaggaagcagctctggtggctatagactacatcaatcaaaaccttccttggggatacaaacacaccttgaaccagattgatgaagtaaaggtgtggcctcagcagccctccggagagctgtttgagattgaaatagacaccctggaaaccacctgccatgtgctggaccccacccctgtggcaagatgcagcgtgaggcagctgaaggagcatgctgtcgaaggagactgtgatttccagctgttgaaactagatggcaagttttccgtggtatacgcaaaatgtgattccagtccagactcagccgaggacgtgcgcaaggtgtgccaagactgccccctgctggccccgctgaacgacaccagggtggtgcacgccgcgaaagctgccctggccgccttcaacgctcagaacaacggctccaattttcagctggaggaaatttcccgggctcagcttgtgcccctcccaccttctacctatgtggagtttacagtgtctggcactgactgtgttgctaaagaggccacagaggcagccaagtgtaacctgctggcagaaaagcaatatggcttttgtaaggcaacactcagtgagaagcttggtggggcagaggttgcagtgacctgcatggtgttccaaacacagcccgtgagctcacagccccaaccagaaggtgccaatgaagcagtccccacacccgtggtggacccagatgcacctccgtcccctccacttggcgcacctggactccctccagctggctcacccccagactcccatgtgttactggcagctcctccaggacaccagttgcaccgggcgcactacgacctgcgccacaccttcatgggtgtggtctcattggggtcaccctcaggagaagtgtcgcacccccggaaaacacgcacagtggtgcagcctagtgttggtgctgctgctgggccagtggttcctccatgtccggggaggatcagacacttcaaggtctaggctagacatggcagagatgaggaggtttggcacagaaaacatagccaccattttgtccaagcctgggcatgggtggggggccttgtctgctggccacgcaagtgtcacatgcgatctacattaatatcaagtcttgactccctacttcccgtcattcctcacaggacagaagcagagtgggtggtggttatgtttgacagaaggcattaggttgacaacttgtcatgattttgacggtaagccaccatgattgtgttctctgcctctggttgaccttacaaaaaccattggaactgtgactttgaaaggtgctcttgctaagcttatatgtgcctgttaatgaaagtgcctgaaagaccttccttaataaagaaggttctaagctgaaaaaaaaaaaaaaaaaaaaaaa

SEQ ID NO: 4 - protein, 367 aa, Homo sapiens
MKSLVLLLCLAQLWGCHSAPHGPGLIYRQPNCDDPETEEAALVAIDYINQNLPWGYKHTLNQIDEVKVWPQQPSGELFEIEIDTLETTCHVLDPTPVARCSVRQLKEHAVEGDCDFQLLKLDGKFSVVYAKCDSSPDSAEDVRKVCQDCPLLAPLNDTRVVHAAKAALAAFNAQNNGSNFQLEEISRAQLVPLPPSTYVEFTVSGTDCVAKEATEAAKCNLLAEKQYGFCKATLSEKLGGAEVAVTCMVFQTQPVSSQPQPEGANEAVPTPVVDPDAPPSPPLGAPGLPPAGSPPDSHVLLAAPPGHQLHRAHYDLRHTFMGVVSLGSPSGEVSHPRKTRTVVQPSVGAAAGPVVPPCPGRIRHFKV

SEQ ID NO: 5 - DNA, 3002 bp, Homo sapiens
agaggggtggggtggaggagggaggcgggcgcgccggattggcctctgcgcgccacgtgtccggctcggagcccacggctgtcctcccggtccgccccgcgctgcggttgctgctgggctaacgggctccgatccagcgagcgctgcgtcctcgagtccctgcgcccgtgcgtccgtctgcgacccgaggcctccgctgcgcgtggattctgctgcgaaccggagaccatggccaaaccagcacagggtgccaagtaccggggctccatccatgacttcccaggctttgaccccaaccaggatgccgaggctctgtacactgccatgaagggctttggcagtgacaaggaggccatactggacataatcacctcacggagcaacaggcagaggcaggaggtctgccagagctacaagtccctctacggcaaggacctcattgctgatttaaagtatgaattgacgggcaagtttgaacggttgattgtgggcctgatgaggccacctgcctattgtgatgccaaagaaattaaagatgccatctcgggcattggcactgatgagaagtgcctcattgagatcttggcttcccggaccaatgagcagatgcaccagctggtggcagcatacaaagatgcctacgagcgggacctggaggctgacatcatcggcgacacctctggccacttccagaagatgcttgtggtcctgctccagggaaccagggaggaggatgacgtagtgagcgaggacctggtacaacaggatgtccaggacctatacgaggcaggggaactgaaatggggaacagatgaagcccagttcatttacatcttgggaaatcgcagcaagcagcatcttcggttggtgttcgatgagtatctgaagaccacagggaagccgattgaagccagcatccgaggggagctgtctggggactttgagaagctaatgctggccgtagtgaagtgtatccggagcaccccggaatattttgctgaaaggctcttcaaggctatgaagggcctggggactcgggacaacaccctgatccgcatcatggtctcccgtagtgagttggacatgctcgacattcgggagatcttccggaccaagtatgagaagtccctctacagcatgatcaagaatgacacctctggcgagtacaagaagactctgctgaagctgtctgggggagatgatgatgctgctggccagttcttcccggaggcagcgcaggtggcctatcagatgtgggaacttagtgcagtggcccgagtagagctgaagggaactgtgcgcccagccaatgacttcaaccctgacgcagatgccaaagcgctgcggaaagccatgaagggactcgggactgacgaagacacaatcatcgatatcatcacgcaccgcagcaatgtccagcggcagcagatccggcagaccttcaagtctcactttggccgggacttaatgactgacctgaagtctgagatctctggagacctggcaaggctgattctggggctcatgatgccaccggcccattacgatgccaagcagttgaagaaggccatggagggagccggcacagatgaaaaggctcttattgaaatcctggccactcggaccaatgctgaaatccgggccatcaatgaggcctataaggaggactatcacaagtccctggaggatgctctgagctcagacacatctggccacttcaggaggatcctcatttctctggccacggggcatcgtgaggagggaggagaaaacctggaccaggcacgggaagatgcccaggtggctgctgagatcttggaaatagcagacacacctagtggagacaaaacttccttggagacacgtttcatgacgatcctgtgtacccggagctatccgcacctccggagagtcttccaggagttcatcaagatgaccaactatgacgtggagcacaccatcaagaaggagatgtctggggatgtcagggatgcatttgtggccattgttcaaagtgtcaagaacaagcctctcttctttgccgacaaactttacaaatccatgaagggtgctggcacagatgagaagactctgaccaggatcatggtatcccgcagtgagattgacctgctcaacatccggagggaattcattgagaaatatgacaagtctctccaccaagccattgagggtgacacctccggagacttcctgaaggccttgctggctctctgtggtggtgaggactagggccacagctttggcgggcacttctgccaagaaatggttatcagcaccagccgccatggccaagcctgattgttccagctccagagactaaggaaggggcaggggtggggggaggggttgggttgggctcttatcttcagtggagcttaggaaacgctcccactcccacgggccatcgagggcccagcacggctgagcggctgaaaaaccgtagccatagatcctgtccacctccactcccctctgaccctcaggctttcccagcttcctccccttgctacagcctctgccctggtttgggctatgtcagatccaaaaacatcctgaacctctgtctgtaaaatgagtagtgtctgtactttgaatgagggggttggtggcaggggccagttgaatgtgctgggcggggtggtgggaaggatagtaaatgtgctggggcaaactgacaaatcttcccatccatttcaccacccatctccatccaggccgcgctagagtactggaccaggaatttggatgcctgggttcaaatctgcatctgccatgcacttgtttctgaccttaggccagcccctttccctccctgagtctctattttcttatctacaatgagacagttggacaaaaaaatcttggcttcccttctaacattaacttcctaaagtatgcctccgattcattcccttgacactttttatttctaaggaagaaataaaaagagatacacaaacacataaacacaaaaaaaaaaa

SEQ ID NO: 6 - protein, 673 aa, Homo sapiens
MAKPAQGAKYRGSIHDFPGFDPNQDAEALYTAMKGFGSDKEAILDIITSRSNRQRQEVCQSYKSLYGKDLIADLKYELTGKFERLIVGLMRPPAYCDAKEIKDAISGIGTDEKCLIEILASRTNEQMHQLVAAYKDAYERDLEADIIGDTSGHFQKMLVVLLQGTREEDDVVSEDLVQQDVQDLYEAGELKWGTDEAQFIYILGNRSKQHLRLVFDEYLKTTGKPIEASIRGELSGDFEKLMLAVVKCIRSTPEYFAERLFKAMKGLGTRDNTLIRIMVSRSELDMLDIREIFRTKYEKSLYSMIKNDTSGEYKKTLLKLSGGDDDAAGQFFPEAAQVAYQMWELSAVARVELKGTVRPANDFNPDADAKALRKAMKGLGTDEDTIIDIITHRSNVQRQQIRQTFKSHFGRDLMTDLKSEISGDLARLILGLMMPPAHYDAKQLKKAMEGAGTDEKALIEILATRTNAEIRAINEAYKEDYHKSLEDALSSDTSGHFRRILISLATGHREEGGENLDQAREDAQVAAEILEIADTPSGDKTSLETRFMTILCTRSYPHLRRVFQEFIKMTNYDVEHTIKKEMSGDVRDAFVAIVQSVKNKPLFFADKLYKSMKGAGTDEKTLTRIMVSRSEIDLLNIRREFIEKYDKSLHQAIEGDTSGDFLKALLALCGGED

SEQ ID NO: 7 - DNA, 2879 bp, Homo sapiens
agagaccagagagcatccagaggcctggccggggtcctgcagtgcagacgttgggaggcacggagacggggagagggggaggcggtccaggactcactctgctccacctctgactccttgaagggtgccaagtaccggggctccatccatgacttcccaggctttgaccccaaccaggatgccgaggctctgtacactgccatgaagggctttggcagtgacaaggaggccatactggacataatcacctcacggagcaacaggcagaggcaggaggtctgccagagctacaagtccctctacggcaaggacctcattgctgatttaaagtatgaattgacgggcaagtttgaacggttgattgtgggcctgatgaggccacctgcctattgtgatgccaaagaaattaaagatgccatctcgggcattggcactgatgagaagtgcctcattgagatcttggcttcccggaccaatgagcagatgcaccagctggtggcagcatacaaagatgcctacgagcgggacctggaggctgacatcatcggcgacacctctggccacttccagaagatgcttgtggtcctgctccagggaaccagggaggaggatgacgtagtgagcgaggacctggtacaacaggatgtccaggacctatacgaggcaggggaactgaaatggggaacagatgaagcccagttcatttacatcttgggaaatcgcagcaagcagcatcttcggttggtgttcgatgagtatctgaagaccacagggaagccgattgaagccagcatccgaggggagctgtctggggactttgagaagctaatgctggccgtagtgaagtgtatccggagcaccccggaatattttgctgaaaggctcttcaaggctatgaagggcctggggactcgggacaacaccctgatccgcatcatggtctcccgtagtgagttggacatgctcgacattcgggagatcttccggaccaagtatgagaagtccctctacagcatgatcaagaatgacacctctggcgagtacaagaagactctgctgaagctgtctgggggagatgatgatgctgctggccagttcttcccggaggcagcgcaggtggcctatcagatgtgggaacttagtgcagtggcccgagtagagctgaagggaactgtgcgcccagccaatgacttcaaccctgacgcagatgccaaagcgctgcggaaagccatgaagggactcgggactgacgaagacacaatcatcgatatcatcacgcaccgcagcaatgtccagcggcagcagatccggcagaccttcaagtctcactttggccgggacttaatgactgacctgaagtctgagatctctggagacctggcaaggctgattctggggctcatgatgccaccggcccattacgatgccaagcagttgaagaaggccatggagggagccggcacagatgaaaaggctcttattgaaatcctggccactcggaccaatgctgaaatccgggccatcaatgaggcctataaggaggactatcacaagtccctggaggatgctctgagctcagacacatctggccacttcaggaggatcctcatttctctggccacggggcatcgtgaggagggaggagaaaacctggaccaggcacgggaagatgcccaggtggctgctgagatcttggaaatagcagacacacctagtggagacaaaacttccttggagacacgtttcatgacgatcctgtgtacccggagctatccgcacctccggagagtcttccaggagttcatcaagatgaccaactatgacgtggagcacaccatcaagaaggagatgtctggggatgtcagggatgcatttgtggccattgttcaaagtgtcaagaacaagcctctcttctttgccgacaaactttacaaatccatgaagggtgctggcacagatgagaagactctgaccaggatcatggtatcccgcagtgagattgacctgctcaacatccggagggaattcattgagaaatatgacaagtctctccaccaagccattgagggtgacacctccggagacttcctgaaggccttgctggctctctgtggtggtgaggactagggccacagctttggcgggcacttctgccaagaaatggttatcagcaccagccgccatggccaagcctgattgttccagctccagagactaaggaaggggcaggggtggggggaggggttgggttgggctcttatcttcagtggagcttaggaaacgctcccactcccacgggccatcgagggcccagcacggctgagcggctgaaaaaccgtagccatagatcctgtccacctccactcccctctgaccctcaggctttcccagcttcctccccttgctacagcctctgccctggtttgggctatgtcagatccaaaaacatcctgaacctctgtctgtaaaatgagtagtgtctgtactttgaatgagggggttggtggcaggggccagttgaatgtgctgggcggggtggtgggaaggatagtaaatgtgctggggcaaactgacaaatcttcccatccatttcaccacccatctccatccaggccgcgctagagtactggaccaggaatttggatgcctgggttcaaatctgcatctgccatgcacttgtttctgaccttaggccagcccctttccctccctgagtctctattttcttatctacaatgagacagttggacaaaaaaatcttggcttcccttctaacattaacttcctaaagtatgcctccgattcattcccttgacactttttatttctaaggaagaaataaaaagagatacacaaacacataaacacaaaaaaaaaaa

SEQ ID NO: 8 - protein, 641 aa, Homo sapiens
MKGFGSDKEAILDIITSRSNRQRQEVCQSYKSLYGKDLIADLKYELTGKFERLIVGLMRPPAYCDAKEIKDAISGIGTDEKCLIEILASRTNEQMHQLVAAYKDAYERDLEADIIGDTSGHFQKMLVVLLQGTREEDDVVSEDLVQQDVQDLYEAGELKWGTDEAQFIYILGNRSKQHLRLVFDEYLKTTGKPIEASIRGELSGDFEKLMLAVVKCIRSTPEYFAERLFKAMKGLGTRDNTLIRIMVSRSELDMLDIREIFRTKYEKSLYSMIKNDTSGEYKKTLLKLSGGDDDAAGQFFPEAAQVAYQMWELSAVARVELKGTVRPANDFNPDADAKALRKAMKGLGTDEDTIIDIITHRSNVQRQQIRQTFKSHFGRDLMTDLKSEISGDLARLILGLMMPPAHYDAKQLKKAMEGAGTDEKALIEILATRTNAEIRAINEAYKEDYHKSLEDALSSDTSGHFRRILISLATGHREEGGENLDQAREDAQVAAEILEIADTPSGDKTSLETRFMTILCTRSYPHLRRVFQEFIKMTNYDVEHTIKKEMSGDVRDAFVAIVQSVKNKPLFFADKLYKSMKGAGTDEKTLTRIMVSRSEIDLLNIRREFIEKYDKSLHQAIEGDTSGDFLKALLALCGGED

SEQ ID NO: 9 - DNA, 1297 bp, Homo sapiens
ggggcggggcttcgggcgagagggagggcagcaggagaaaggataagaaagggagtgggactggcgcctacggtggccgaagtgggacgcgccgagccggaggctgcaggatgatgcggttcatgctattattcagccggcagggaaaactgcggctgcaaaaatggtacctggccacttcggacaaggaacggaagaagatggtgcgcgagctcatgcaggttgtcctggctcgaaagcccaagatgtgcagcttcctggagtggagggacctcaaagttgtctataagagatatgccagcctctacttctgctgcgccatcgagggccaagacaatgagctcatcacactggagctgatccaccgatacgtggagctcttagacaaatactttggcagtgtgtgcgagctggacatcatcttcaactttgagaaggcctacttcatcctggatgagtttttgatggggggggatgtccaggacacctccaagaagagtgtgctgaaagccatcgagcaggctgacctactgcaagaggaggatgagtcgccacggagtgtgctggaggagatgggtttggcatagcccctgctgggccggggtgtggcgatggggtcctggcagcgtggcgggaacggctgcttctcctctgcccagggccctgttcttggtgggactcggctgcccctcctctgctgcctcacctttcggagtgagctgtgggctcaggcccttcaaacattccctccctccaccccctacctccactttccccttttcccactgaaggttttagaagctaggaggcaggaaaatgtgacccagatgggggtgctatttggcttttattccctgcctttgcagaactgatgtcaccccagatgtccttccctccctaataactgtaaatatataaatatgtcaggttaaagggaaaaggtgttcagggcacttcttgtcctctctgtcccataacctacctccaccctccccctagccagccaggcagcttctctgcctgggaggggagcctggacccccctctttctccttggctgcagtggggcctttatccagtgccagggaggaacaacatagttaatttttttctaaccttgccactttgagggaaggaagggttgggggaagggcaagctttatgggaccctggtcctggccctggcctttcactccagttctgggtgaggcaggagctgggaggggtggggagggggagggggaagtgtctgcctttatgtcctttcttctgaaataaaagtaaaagcatttctgga

SEQ ID NO: 10 - protein, 158 aa, Homo sapiens
MMRFMLLFSRQGKLRLQKWYLATSDKERKKMVRELMQVVLARKPKMCSFLEWRDLKVVYKRYASLYFCCAIEGQDNELITLELIHRYVELLDKYFGSVCELDIIFNFEKAYFILDEFLMGGDVQDTSKKSVLKAIEQADLLQEEDESPRSVLEEMGLA

SEQ ID NO: 11 - DNA, 2251 bp, Homo sapiens
gcgcaacgtcatttccgcgtacgggggagggcgggcctggagtctgagccggcgccgctcagtgtgaggtggtttctgcgggtgaggctggcgcccgtaccatgagcgaggcggacgggctgcgacagcgccggcccctgcggccgcaggtcgtcacagacgatgatggccaggccccggaggctaaggacggcagctcctttagcggcagagttttccgagtgaccttcttgatgctggctgtttctctcaccgttcccctgcttggagccatgatgctgctggaatctcctatagatccacagcctctcagcttcaaagaacccccgctcttgcttggtgttctgcatccaaatacgaagctgcgacaggcagaaaggctgtttgaaaatcaacttgttggaccggagtccatagcacatattggggatgtgatgtttactgggacagcagatggccgggtcgtaaaacttgaaaatggtgaaatagagaccattgcccggtttggttcgggcccttgcaaaacccgagatgatgagcctgtgtgtgggagacccctgggtatccgtgcagggcccaatgggactctctttgtggccgatgcatacaagggactatttgaagtaaatccctggaaacgtgaagtgaaactgctgctgtcctccgagacacccattgaggggaagaacatgtcctttgtgaatgatcttacagtcactcaggatgggaggaagatttatttcaccgattctagcagcaaatggcaaagacgagactacctgcttctggtgatggagggcacagatgacgggcgcctgctggagtatgatactgtgaccagggaagtaaaagttttattggaccagctgcggttcccgaatggagtccagctgtctcctgcagaagactttgtcctggtggcagaaacaaccatggccaggatacgaagagtctacgtttctggcctgatgaagggcggggctgatctgtttgtggagaacatgcctggatttccagacaacatccggcccagcagctctggggggtactgggtgggcatgtcgaccatccgccctaaccctgggttttccatgctggatttcttatctgagagaccctggattaaaaggatgatttttaagctctttagtcaagagacggtgatgaagtttgtgccgcggtacagcctcgtcctagaactcagcgacagcggtgccttccggagaagcctgcatgatcccgatgggctggtggccacctacatcagcgaggtgcacgaacacgatgggcacctgtacctgggctctttcaggtcccccttcctctgcagactcagcctccaggctgtttagccctcccagatagctgcccctgccacgcaggccaggagtcttcacactcaggcaccaggcctggtccaggaggagctgtggacacagtcgtggttcaagtgtccacatgcacctgttagtccctgagaggtggtgggaatggctgcttcattcctcgaggatgcccgggccccacctgggcttgtctttctgtttagagggaagtgtaacatatctgccatgaggaacataaattcatgtaaagccattttctcttaaacaaaacaaaactttctaagtacagtcattctctaggatttgggaagctccttgcacttggaacagggctcaggtgggtggagcagtaaggcactacccagagagcttgctgctgcggccctgtcctgcggcctcaaagttcttctttactatatataacgtgcggtcatacctttcttcgttgtggtggggatggaagagcagagggagcatggcccaggggtgttgaggccagcggtgagagccgtgttagccaagacatggaactgtgttctcaagggttatgtggggcgtgggctctccatagtgtgtatgaaaagcttgttgactctagcggctcagagaggactttgctgggtttctttctgtgaatatctccgtgctgaccatgctggaattggatgattctgcaattcgggacctactgcaggggtccgtttagtaacgtcttgtctgtgatctttgttcttgacctctagaccccaagatgtgaacagtgcacgtgttaatgtcatctttgctcatgtgttataagccccaagttgctgtatattttcacaagtatgtctacacactggtcatgattttgataataaataacgataaatcgaaaaaaaaaaaaaaaaaaaaaaaaaaaaaaa

SEQ ID NO: 12 - protein, 416 aa, Homo sapiens
MSEADGLRQRRPLRPQVVTDDDGQAPEAKDGSSFSGRVFRVTFLMLAVSLTVPLLGAMMLLESPIDPQPLSFKEPPLLLGVLHPNTKLRQAERLFENQLVGPESIAHIGDVMFTGTADGRVVKLENGEIETIARFGSGPCKTRDDEPVCGRPLGIRAGPNGTLFVADAYKGLFEVNPWKREVKLLLSSETPIEGKNMSFVNDLTVTQDGRKIYFTDSSSKWQRRDYLLLVMEGTDDGRLLEYDTVTREVKVLLDQLRFPNGVQLSPAEDFVLVAETTMARIRRVYVSGLMKGGADLFVENMPGFPDNIRPSSSGGYWVGMSTIRPNPGFSMLDFLSERPWIKRMIFKLFSQETVMKFVPRYSLVLELSDSGAFRRSLHDPDGLVATYISEVHEHDGHLYLGSFRSPFLCRLSLQAV

SEQ ID NO: 13 - DNA, 1314 bp, Homo sapiens
gactcaccgggggcggctcctggccgcgcacctccagggggcggggggcggctgagacagcgcccagggcctcggagcaaggcgttggcagatctgaagacagcatgtacacagccattccccagagtggctctccattcccaggctcagtgcaggatccaggcctgcatgtgtggcgggtggagaagctgaagccggtgcctgtggcgcaagagaaccagggcgtcttcttctcgggggactcctacctagtgctgcacaatggcccagaagaggtttcccatctgcacctgtggataggccagcagtcatcccgggatgagcagggggcctgtgccgtgctggctgtgcacctcaacacgctgctgggagagcggcctgtgcagcaccgcgaggtgcagggcaatgagtctgacctcttcatgagctacttcccacggggcctcaagtaccaggaaggtggtgtggagtcagcatttcacaagacctccacaggagccccagctgccatcaagaaactctaccaggtgaaggggaagaagaacatccgtgccaccgagcgggcactgaactgggacagcttcaacactggggactgcttcatcctggacctgggccagaacatcttcgcctggtgtggtggaaagtccaacatcctggaacgcaacaaggcgagggacctggccctggccatccgggacagtgagcgacagggcaaggcccaggtggagattgtcactgatggggaggagcctgctgagatgatccaggtcctgggccccaagcctgctctgaaggagggcaaccctgaggaagacctcacagctgacaaggcaaatgcccaggccgcagctctgtataaggtctctgatgccactggacagatgaacctgaccaaggtggctgactccagcccatttgcccttgaactgctgatatctgatgactgctttgtgctggacaacgggctctgtggcaagatctatatctggaaggggcgaaaagcgaatgagaaggagcggcaggcagccctgcaggtggccgagggcttcatctcgcgcatgcagtacgccccgaacactcaggtggagattctgcctcagggccatgagagtcccatcttcaagcaatttttcaaggactggaaatgagggtgggcgtcttcctgccccatgctcccctgccccccaccacctgcctgcttgcttctctggctgcctggtcagtgcagaggtgccccctgcagatgttcaataaaggagacaagtgctttcccagctcttttcctgcaccaccaaaaaaaaaaaaaaaaaa

SEQ ID NO: 14 - protein, 348 aa, Homo sapiens
MYTAIPQSGSPFPGSVQDPGLHVWRVEKLKPVPVAQENQGVFFSGDSYLVLHNGPEEVSHLHLWIGQQSSRDEQGACAVLAVHLNTLLGERPVQHREVQGNESDLFMSYFPRGLKYQEGGVESAFHKTSTGAPAAIKKLYQVKGKKNIRATERALNWDSFNTGDCFILDLGQNIFAWCGGKSNILERNKARDLALAIRDSERQGKAQVEIVTDGEEPAEMIQVLGPKPALKEGNPEEDLTADKANAQAAALYKVSDATGQMNLTKVADSSPFALELLISDDCFVLDNGLCGKIYIWKGRKANEKERQAALQVAEGFISRMQYAPNTQVEILPQGHESPIFKQFFKDWK

SEQ ID NO: 15 - DNA, 1559 bp, Homo sapiens
ctgaatggagaacatggctttccttgctggtctcagactcagagatgccctccctgatttgccttggctgtgacctgcagcgggctgaggccactgtggtggggctgtgtggacctccagcctccctgtgtgcccctctgaggagacggcctggcatacccactgcccaccccagtgactgctcttctgcttcaggcctgctggcctcccagcactgcctgcccctccctgtcgggggacatcgcctccacaccggctggggaaggagcccaggggtggggctggtgggtggggctggtggttggggcagccagagaagtaagagggaagtgagaagccgggtggggcaggctggaaggaagacgaacctacgaagcagagatctgaagacagcatgtacacagccattccccagagtggctctccattcccaggctcagtgcaggatccaggcctgcatgtgtggcgggtggagaagctgaagccggtgcctgtggcgcaagagaaccagggcgtcttcttctcgggggactcctacctagtgctgcacaatggcccagaagaggtttcccatctgcacctgtggataggccagcagtcatcccgggatgagcagggggcctgtgccgtgctggctgtgcacctcaacacgctgctgggagagcggcctgtgcagcaccgcgaggtgcagggcaatgagtctgacctcttcatgagctacttcccacggggcctcaagtaccaggaaggtggtgtggagtcagcatttcacaagacctccacaggagccccagctgccatcaagaaactctaccaggtgaaggggaagaagaacatccgtgccaccgagcgggcactgaactgggacagcttcaacactggggactgcttcatcctggacctgggccagaacatcttcgcctggtgtggtggaaagtccaacatcctggaacgcaacaaggcgagggacctggccctggccatccgggacagtgagcgacagggcaaggcccaggtcctgggccccaagcctgctctgaaggagggcaaccctgaggaagacctcacagctgacaaggcaaatgcccaggccgcagctctgtataaggtctctgatgccactggacagatgaacctgaccaaggtggctgactccagcccatttgcccttgaactgctgatatctgatgactgctttgtgctggacaacgggctctgtggcaagatctatatctggaaggggcgaaaagcgaatgagaaggagcggcaggcagccctgcaggtggccgagggcttcatctcgcgcatgcagtacgccccgaacactcaggtggagattctgcctcagggccatgagagtcccatcttcaagcaatttttcaaggactggaaatgagggtgggcgtcttcctgccccatgctcccctgccccccaccacctgcctgcttgcttctctggctgcctggtcagtgcagaggtgccccctgcagatgttcaataaaggagacaagtgctttcccagctcttttcctgcaccaccaaaaaaaaaaaaaaaaaa

SEQ ID NO: 16 - protein, 333 aa, Homo sapiens
MYTAIPQSGSPFPGSVQDPGLHVWRVEKLKPVPVAQENQGVFFSGDSYLVLHNGPEEVSHLHLWIGQQSSRDEQGACAVLAVHLNTLLGERPVQHREVQGNESDLFMSYFPRGLKYQEGGVESAFHKTSTGAPAAIKKLYQVKGKKNIRATERALNWDSFNTGDCFILDLGQNIFAWCGGKSNILERNKARDLALAIRDSERQGKAQVLGPKPALKEGNPEEDLTADKANAQAAALYKVSDATGQMNLTKVADSSPFALELLISDDCFVLDNGLCGKIYIWKGRKANEKERQAALQVAEGFISRMQYAPNTQVEILPQGHESPIFKQFFKDWK

SEQ ID NO: 17 - DNA, 1604 bp, Homo sapiens
ctgaatggagaacatggctttccttgctggtctcagactcagagatgccctccctgatttgccttggctgtgacctgcagcgggctgaggccactgtggtggggctgtgtggacctccagcctccctgtgtgcccctctgaggagacggcctggcatacccactgcccaccccagtgactgctcttctgcttcaggcctgctggcctcccagcactgcctgcccctccctgtcgggggacatcgcctccacaccggctggggaaggagcccaggggtggggctggtgggtggggctggtggttggggcagccagagaagtaagagggaagtgagaagccgggtggggcaggctggaaggaagacgaacctacgaagcagagatctgaagacagcatgtacacagccattccccagagtggctctccattcccaggctcagtgcaggatccaggcctgcatgtgtggcgggtggagaagctgaagccggtgcctgtggcgcaagagaaccagggcgtcttcttctcgggggactcctacctagtgctgcacaatggcccagaagaggtttcccatctgcacctgtggataggccagcagtcatcccgggatgagcagggggcctgtgccgtgctggctgtgcacctcaacacgctgctgggagagcggcctgtgcagcaccgcgaggtgcagggcaatgagtctgacctcttcatgagctacttcccacggggcctcaagtaccaggaaggtggtgtggagtcagcatttcacaagacctccacaggagccccagctgccatcaagaaactctaccaggtgaaggggaagaagaacatccgtgccaccgagcgggcactgaactgggacagcttcaacactggggactgcttcatcctggacctgggccagaacatcttcgcctggtgtggtggaaagtccaacatcctggaacgcaacaaggcgagggacctggccctggccatccgggacagtgagcgacagggcaaggcccaggtggagattgtcactgatggggaggagcctgctgagatgatccaggtcctgggccccaagcctgctctgaaggagggcaaccctgaggaagacctcacagctgacaaggcaaatgcccaggccgcagctctgtataaggtctctgatgccactggacagatgaacctgaccaaggtggctgactccagcccatttgcccttgaactgctgatatctgatgactgctttgtgctggacaacgggctctgtggcaagatctatatctggaaggggcgaaaagcgaatgagaaggagcggcaggcagccctgcaggtggccgagggcttcatctcgcgcatgcagtacgccccgaacactcaggtggagattctgcctcagggccatgagagtcccatcttcaagcaatttttcaaggactggaaatgagggtgggcgtcttcctgccccatgctcccctgccccccaccacctgcctgcttgcttctctggctgcctggtcagtgcagaggtgccccctgcagatgttcaataaaggagacaagtgctttcccagctcttttcctgcaccaccaaaaaaaaaaaaaaaaaa

SEQ ID NO: 18 - protein, 348 aa, Homo sapiens; identical to SEQ ID NO: 14

SEQ ID NO: 19 - DNA, 1943 bp, Homo sapiens
aaaaagaagtttagattcgcttcccggagccgggatggcagcctgcgctatggttggggaccaacgtggtgcacgggcaggggccggggagagaggcggccgcagcgggagcccgggagcgcagggcgggcctggaagagctccgccccaaggggcgcggccaccccggaggcgggcgcacggctgcttctcattcattgtcttgacaagagcatcttcagcgggcgagtccccggctcctccagctccttcctcctcttcctcctcctcctccacctccggcttttgggggatcactgtcctctctcggcagcagatacaggctgctcctcaagactggggctcttcacatacgctcctcaccgctctttgggcaggccgacctagcagcctcttcgggagtcctggggtggccgggggtgctggagcccccaaatgagccggcaggtggtccgctccagcaagttccgccacgtgtttggacagccggccaaggccgaccagtgctatgaagatgtgcgcgtctcacagaccacctgggacagtggcttctgtgctgtcaaccctaagtttgtggccctgatctgtgaggccagcgggggaggggccttcctggtgctgcccctgggcaagactggacgtgtggacaagaatgcgcccacggtctgtggccacacagcccctgtgctagacatcgcctggtgcccgcacaatgacaacgtcattgccagtggctccgaggactgcacagtcatggtgtgggagatcccagatgggggcctgatgctgcccctgcgggagcccgtcgtcaccctggagggccacaccaagcgtgtgggcattgtggcctggcacaccacagcccagaacgtgctgctcagtgcaggttgtgacaacgtgatcatggtgtgggacgtgggcactggggcggccatgctgacactgggcccagaggtgcacccagacacgatctacagtgtggactggagccgagatggaggcctcatttgtacctcctgccgtgacaagcgcgtgcgcatcatcgagccccgcaaaggcactgtcgtagctgagaaggaccgtccccacgaggggacccggcccgtgcgtgcagtgttcgtgtcggaggggaagatcctgaccacgggcttcagccgcatgagtgagcggcaggtggcgctgtgggacacaaagcacctggaggagccgctgtccctgcaggagctggacaccagcagcggtgtcctgctgcccttctttgaccctgacaccaacatcgtctacctctgtggcaagggtgacagctcaatccggtactttgagatcacttccgaggcccctttcctgcactatctctccatgttcagttccaaggagtcccagcggggcatgggctacatgcccaaacgtggcctggaggtgaacaagtgtgagatcgccaggttctacaagctgcacgagcggaggtgtgagcccattgccatgacagtgcctcgaaagtcggacctgttccaggaggacctgtacccacccaccgcagggcccgaccctgccctcacggctgaggagtggctggggggtcgggatgctgggcccctcctcatctccctcaaggatggctacgtacccccaaagagccgggagctgagggtcaaccggggcctggacaccgggcgcaggagggcagcaccagaggccagtggcactcccagctcggatgccgtgtctcggctggaggaggagatgcggaagctccaggccacggtgcaggagctccagaagcgcttggacaggctggaggagacagtccaggccaagtagagccccgcagggcctccagcagggtcagccattcacacccatccactcacctcccattcccagccacatggcagagaaaaaaatcataataaaatggctttattttctggtaaaaaaaaaaa

SEQ ID NO: 20 - protein, 461 aa, Homo sapiens
MSRQVVRSSKFRHVFGQPAKADQCYEDVRVSQTTWDSGFCAVNPKFVALICEASGGGAFLVLPLGKTGRVDKNAPTVCGHTAPVLDIAWCPHNDNVIASGSEDCTVMVWEIPDGGLMLPLREPVVTLEGHTKRVGIVAWHTTAQNVLLSAGCDNVIMVWDVGTGAAMLTLGPEVHPDTIYSVDWSRDGGLICTSCRDKRVRIIEPRKGTVVAEKDRPHEGTRPVRAVFVSEGKILTTGFSRMSERQVALWDTKHLEEPLSLQELDTSSGVLLPFFDPDTNIVYLCGKGDSSIRYFEITSEAPFLHYLSMFSSKESQRGMGYMPKRGLEVNKCEIARFYKLHERRCEPIAMTVPRKSDLFQEDLYPPTAGPDPALTAEEWLGGRDAGPLLISLKDGYVPPKSRELRVNRGLDTGRRRAAPEASGTPSSDAVSRLEEEMRKLQATVQELQKRLDRLEETVQAK

SEQ ID NO: 21 - DNA, 1825 bp, Homo sapiens
aaaaagaagtttagattcgcttcccggagccgggatggcagcctgcgctatggttggggaccaacgtggtgcacgggcaggggccggggagagaggcggccgcagcgggagcccgggagcgcagggcgggcctggaagagctccgccccaaggggcgcggccaccccggaggcgggcgcacggctgcttctcattcattgtcttgacaagagcatcttcagcgggcgagtccccggctcctccagctccttcctcctcttcctcctcctcctccacctccggcttttgggggatcactgtcctctctcggcagcagaatgagccggcaggtggtccgctccagcaagttccgccacgtgtttggacagccggccaaggccgaccagtgctatgaagatgtgcgcgtctcacagaccacctgggacagtggcttctgtgctgtcaaccctaagtttgtggccctgatctgtgaggccagcgggggaggggccttcctggtgctgcccctgggcaagactggacgtgtggacaagaatgcgcccacggtctgtggccacacagcccctgtgctagacatcgcctggtgcccgcacaatgacaacgtcattgccagtggctccgaggactgcacagtcatggtgtgggagatcccagatgggggcctgatgctgcccctgcgggagcccgtcgtcaccctggagggccacaccaagcgtgtgggcattgtggcctggcacaccacagcccagaacgtgctgctcagtgcaggttgtgacaacgtgatcatggtgtgggacgtgggcactggggcggccatgctgacactgggcccagaggtgcacccagacacgatctacagtgtggactggagccgagatggaggcctcatttgtacctcctgccgtgacaagcgcgtgcgcatcatcgagccccgcaaaggcactgtcgtagctgagaaggaccgtccccacgaggggacccggcccgtgcgtgcagtgttcgtgtcggaggggaagatcctgaccacgggcttcagccgcatgagtgagcggcaggtggcgctgtgggacacaaagcacctggaggagccgctgtccctgcaggagctggacaccagcagcggtgtcctgctgcccttctttgaccctgacaccaacatcgtctacctctgtggcaagggtgacagctcaatccggtactttgagatcacttccgaggcccctttcctgcactatctctccatgttcagttccaaggagtcccagcggggcatgggctacatgcccaaacgtggcctggaggtgaacaagtgtgagatcgccaggttctacaagctgcacgagcggaggtgtgagcccattgccatgacagtgcctcgaaagtcggacctgttccaggaggacctgtacccacccaccgcagggcccgaccctgccctcacggctgaggagtggctggggggtcgggatgctgggcccctcctcatctccctcaaggatggctacgtacccccaaagagccgggagctgagggtcaaccggggcctggacaccgggcgcaggagggcagcaccagaggccagtggcactcccagctcggatgccgtgtctcggctggaggaggagatgcggaagctccaggccacggtgcaggagctccagaagcgcttggacaggctggaggagacagtccaggccaagtagagccccgcagggcctccagcagggtcagccattcacacccatccactcacctcccattcccagccacatggcagagaaaaaaatcataataaaatggctttattttctggtaaaaaaaaaaa

SEQ ID NO: 22 - protein, 461 aa, Homo sapiens; identical to SEQ ID NO: 20

SEQ ID NO: 23 - DNA, 1790 bp, Homo sapiens
cggcgcgtacccgccgcgctcccatccccgccgccggccaggggcgcgctcggccgccccggacagtgtcccgctgcggctccgcggcgatggccaccaagatcgacaaagaggcttgccgggcggcgtacaacctggtgcgcgacgacggctcggccgtcatctgggtgacttttaaatatgacggctccaccatcgtccccggcgagcagggagcggagtaccagcacttcatccagcagtgcacagatgacgtccggttgtttgccttcgtgcgcttcaccaccggggatgccatgagcaagaggtccaagtttgccctcatcacgtggatcggtgagaacgtcagcgggctgcagcgcgccaaaaccgggacggacaagaccctggtgaaggaggtcgtacagaatttcgctaaggagtttgtgatcagtgatcggaaggagctggaggaagatttcatcaagagcgagctgaagaaggcggggggagccaattacgacgcccagacggagtaaccccagcccccgccacaccaccccttgccaaagtcatctgcctgctccccgggggagaggaccgccggcctcagctactagcccaccagcccaccagggagaaaagaagccatgagaggcagcgcccgccaccctgtgtccacagcccccaccttcccgcttcccttagaaccctgccgtgtcctatctcatgacgctcatggaacctctttctttgatcttctttttcttttctccccctcttttttgttctaaagaaaagtcattttgatgcaaggtcctgcctgccatcagatccgaggtgcctcctgcagtgaccccttttcctggcatttctcttccacgcgacgaggtctgcctagtgagatctgcatgacctcacgttgctttccagagcccgggcctattttgccatctcagttttcctggaccctgcttcctgtgtaccactgaggggcagctgggccaggagctgtgcccggtgcctgcagccttcataagcacacacgtccattccctactaaggcccagacctcctggtatctgccccgggctccctcatcccacctccatccggagttgcctaagatgcatgtccagcataggcaggattgctcggtggtgagaaggttaggtccggctcagactgaataagaagagataaaatttgccttaaaacttacctggcagtggctttgctgcacggtctgaaaccacctgttcccaccctcttgaccgaaatttccttgtgacacagagaagggcaaaggtctgagcccagagttgacggagggagtatttcagggttcacttcaggggctcccaaagcgacaagatcgttagggagagaggcccagggtggggactgggaatttaaggagagctgggaacggatcccttaggttcaggaagcttctgtgtaagctgcgaggatggcttgggccgaagggttgctctgcccgccgcgctagctgtgagctgagcaaagccctgggctcacagcaccccaaaagcctgtggcttcagtcctgcgtctgcaccacacattcaaaaggatcgttttgttttgtttttaaagaaaggtgagattggcttggttcttcatgagcacatttgatatagctctttttctgtttttccttgctcatttcgttttggggaagaaatctgtactgtattgggattgtaaagaacatctctgcactcagacagtttacagaaataaatgttttttttgtttttcagaaaaaaaaaaaaaaaaaaaaaaaaaaa

SEQ ID NO: 24 - protein, 142 aa, Homo sapiens
MATKIDKEACRAAYNLVRDDGSAVIWVTFKYDGSTIVPGEQGAEYQHFIQQCTDDVRLFAFVRFTTGDAMSKRSKFALITWIGENVSGLQRAKTGTDKTLVKEVVQNFAKEFVISDRKELEEDFIKSELKKAGGANYDAQTE

SEQ ID NO: 25 - DNA, 2728 bp, Homo sapiens
ctttccgcctgtgcagctcgccggctcaatactccgggggtctgggtggggggctcaaacgcagggctctgggacgcaggcactgctccaggtgatagtgcgggaacatggccttgcagctgggcaggctgagctcgggcccctgctggctcgtggcgcggggcggctgcggagggccccgcgcctggtcccagtgcggcggcggagggctccgagcctggtcccagcgcagcgcagccggacgcgtctgccggccccctggcccggctggcacggagcagagccgcgggctggggcacggctcgacgtcgagaggcggcccctgggtggggacagggctggccgcggcgctggcggggttggtggggctggccaccgccgccttcgggcatgtgcagcgggcggagatgttgcctaagacctcggggacgcgggccacttcgctggggaggccggaggaggaggaggatgagctggcccaccgctgcagcagcttcatggccccgcctgtgaccgacctgggcgagctgcgaaggaggccgggcgacatgaagaccaagatggagctgctgattctggagacccaggcccaggtgtgccaggctctggcacaggtagacgggggcgccaacttttctgtggaccggtgggagaggaaggaaggaggtggcggcatcagctgtgtacttcaagatgggtgtgttttcgaaaaggctggggtgagcatttctgttgttcatggaaatctttcagaggaagctgcaaaacaaatgagaagcagaggaaaagttctgaagactaaagatggtaaattgccattttgtgctatgggcgtgagctctgttatccaccccaagaatcctcatgctcctactatccatttcaactacagatactttgaagtagaagaagctgatggcaacaagcagtggtggtttggtggtggatgtgacctcactccaacatacttgaatcaagaagacgctgtccattttcacagaactctgaaggaggcttgtgaccagcatggtccagatctctaccccaaatttaaaaaatggtgtgatgattacttctttatagcccatcgtggagaacggcggggcattggtggtatcttttttgatgatcttgactctccgtccaaggaggaggtgtttcgctttgtacagagctgtgccagggctgtagttccttcttacattccccttgtgaaaaagcactgtgatgactcattcaccccccaggagaagctgtggcagcagctcagaagaggacggtatgtagaatttaatctgctgtatgatcggggcacaaagtttggcctcttcactccaggatccagaattgaaagtatcttgatgtctttacctctaactgcccgatgggagtacatgcattcaccctcagagaattccaaagaagctgaaattctggaagttctacgccatccaagggactgggtgcgttgatgcaggcagaatggctgtgcaggggtttggagggcacacgatgtgtgctccccatgccactggtcggcactttgccactgtgtggcagttacccgtgccttagtcttctccactctgcaccctacctcgtgggcagatgataacatgttttggatgctgtcagtgatgaatggtgagatggcagattgtcagagtcaattgattaaacctcatttatacttctagtgtcattttatatgactagtttacaaaataggacattgagtttccaagtattgagataagggaatataaatagtattatatgtatcaggaaatctctcatcttgtttttgtttcatgtattttttaaagttttcatttgtgccacaaaaatctgtcgtggaatatattttattttcattaattcagtgaagttgagacttcatagtaattttagaatgcaacttgaaggtaaaaattttactttgtcaatactgaagtctctgctgtaatccttatatatctttctccagagaacataatattgtcaaatagatacacatttttctaataggtatttagaagcacttgaaataatctctgcatgtgttacaattcagttatttctgtagtttgtaaactctaaagtgacattactattattttagagatgtctaagttgtaattttgatttttgtggaaccattgtttgttaatgttgggattctctgcacttttgaatgtgaaagcttatatccctgaattctgatacttaagagttttctatttcagacatctctgtgtggaagttgagactaagaataatcctagggatgtcatgaatttaggcaatgtttctcatttggaaaatgaaatgagaaataatttccttctttaaagcaagtatatatagtatgagaaacttggaggcatttcatacacacgtttcttaggaaaatggacacattgaaaatgtcctcttttttatattagagattctgcagctctttgctcttaagagcaaatcacaacaggattcttaatgtatgatttctttgttcatatattatgaatgtattattttatttgcttcgtaataaagtttataaggaagagcatctcatacatatcattatcgtggaacacgttgaatgtttgtgattctgtgtggcctttttggggctggaaaatgtatgaattcttcaactgtcttacaagagatctgctaataaattttattattaaataagactaaaaaaaaaaaaaaaaaaaaa

SEQ ID NO: 26 - protein, 454 aa, Homo sapiens
MALQLGRLSSGPCWLVARGGCGGPRAWSQCGGGGLRAWSQRSAAGRVCRPPGPAGTEQSRGLGHGSTSRGGPWVGTGLAAALAGLVGLATAAFGHVQRAEMLPKTSGTRATSLGRPEEEEDELAHRCSSFMAPPVTDLGELRRRPGDMKTKMELLILETQAQVCQALAQVDGGANFSVDRWERKEGGGGISCVLQDGCVFEKAGVSISVVHGNLSEEAAKQMRSRGKVLKTKDGKLPFCAMGVSSVIHPKNPHAPTIHFNYRYFEVEEADGNKQWWFGGGCDLTPTYLNQEDAVHFHRTLKEACDQHGPDLYPKFKKWCDDYFFIAHRGERRGIGGIFFDDLDSPSKEEVFRFVQSCARAVVPSYIPLVKKHCDDSFTPQEKLWQQLRRGRYVEFNLLYDRGTKFGLFTPGSRIESILMSLPLTARWEYMHSPSENSKEAEILEVLRHPRDWVR

SEQ ID NO: 27 - DNA, 6630 bp, Homo sapiens
ctcggaagtgacgcaagcgcccccccaccgccgctagatccgctgctgctgccgcggcgggcagacctgcaggaggcggcggcggcggcggcggccgaggctgaaggaagatggcggacggcgtggaccacatagacatttacgcggatgtcggcgaagagttcaaccaggaagctgaatatggtgggcatgatcagatagatttgtatgacgatgtcatatctccatctgcaaataatggagatgccccagaagaccgagattacatggatactctcccaccaactgttggtgatgatgtgggtaaaggagcagcaccaaatgttgtctatacatatactggaaagagaattgcattatatattggaaatctaacatggtggacaacagatgaagacttaactgaagcagttcattctttgggagtaaatgatattttggagataaaattttttgaaaatcgggcaaatggccagtcaaaggggtttgcccttgttggtgttggatctgaagcatcttcaaaaaagttaatggatctgttacctaaaagagaacttcatggtcagaatcctgttgtaactccatgcaataaacagttcctgagtcaatttgaaatgcagtccaggaaaactacacaatcaggacaaatgtctggggaaggtaaagctggtcctccaggaggcagttcccgtgcagcatttccacaaggtggtagaggacggggccgttttccaggggctgttcctggtggggacagatttcctgggccagcaggaccaggagggccacccccaccttttccagctggacagactccaccacgtccacccttaggtcctccaggcccacctggtccaccaggtcctccacctcctggtcaggttctgcctcctcctctagctgggcctcctaatcgaggagatcgccctccaccaccagttctttttcctggacaaccttttgggcagcctccattgggtccacttcctcctggccctccacctccagttccaggctacggcccccctcctggcccaccacctccacaacagggaccacctccacctccaggcccctttccacctcgtccacccggtccacttgggccaccccttacactagctcctcctccgcatcttcctggaccacctccaggtgccccaccgccagctccgcatgtgaacccagctttctttcctccaccaactaacagtggcatgcctacatcagatagccgaggtccaccaccaacagatccatatgggcgacctccaccatatgataggggtgactatggcccccctggaagggaaatggatactgcaagaacgccattgagtgaagctgaatttgaagaaatcatgaatagaaatagggcaatctcaagcagtgctatttcgagagctgtgtctgatgccagtgctggtgattatgggagtgctattgagacactggtaactgcaatttctttaattaaacaatccaaagtatctgctgatgatcgttgcaaagttcttattagttctttgcaagattgccttcatggaattgagtccaagtcttatggttctggatcaagacgtgaacgatcaagagagagggaccatagtagatcacgagaaaagagtcgacgtcataaatcccgtagtagagaccgtcatgacgattattacagagagagaagcagagaacgagagaggcaccgggatcgtgaccgagaccgtgaccgagagcgtgaccgagagcgcgaatatcgtcatcgttagaagctgaaggaagaggatcaccttccaagacaaaacagtcttcatgggggaaaaatgacgcttgtccagcagtttgcttcttgtgattgaactgaacctgtaaggattcatggataaaatgaacaggaatagatctgaataaagcaaatctgcataaatggtaaccagtagctctacttttattttttatgttgcttaactgttttatttgaaggaaacctgtgtgatttaaaaagttatagcttttgcaactttattactggttatatacatttggccattatgatgtgcaagcaattggaaaaaaagtcaagtaaatgcttgtttttgtagtagtttgttcttgttaaaaatgtttatatgataatgtctgtaaacagcatcactttgattacaatagatgtagtgttgtaataaactgtttaatggggctgatgtgtaaagctgttcaagttatttgatgtttacacctcagggaaagtcttgtgttcagcaatatctaaagataatgttactatgacaacatttttactgtcctttaaagcattgcaatagcgtttttggatatgcctcaatctaatcttgcgttcagtgaattaaacatagtaattaagtgtcttttgcccttgattttgatattagaataggtgattacatggatatttaatatttctatattctgcttttctagctgtttttacctagttagcttgtgactttgctgaatggtatgtaaacttgtaaaaatagagatttgacagacatagcaatctagtcaatgtgtaaggggtcaaaaaaacagaggttttaacacataagtaaaaacccgtacatatttgatgtgtaatgcaggttaattacaacacagatgtaccgaaacacttaattgtgaaccgctaacattgaagaaattttgacaattccgatttgatgctgcaattacttgctgtttttattgatcttatggtttatttcttaagccatagtcagtgtaaatacagccctgcagcaggtaaatgtgagtaaagagagccttatattttccaattggtataaatttttgaaggatgtgatgttcattaacattcggttgtattccccagtatttgtaatgggaaattacagataaaccgtgtctgcacagtttaaggaatactatgtatattcatgcaccgtattgattcatgctatagttacttaatcaaagatttttttcaaacctgccttacatataggcccactttaaaagcacctgactagcatgtgttcttgattgcaaaattggcagaggcagggtgtcaacttgattaggtgtttttatgggaatgtaatttgaaatcactacttcagaaatttgacttaaaattcttgagcacgttaatatgtttttaagatctgattatctttgagagatcttctgttaatacacattggttgttaaagagtacccaaattctaggacaatgcttaaagtgttaaaataccctagatactgtgttatgtgcaactgtagaaaccctccagaaatttccactgctgttcttcactttcatcttgtctgctatcaaaccacttctgacaaaattagctgttttgaattacccatatcactgccagttttattttaaaatattttgtgtttgaagtatctgtgcatgggatcgttgatgtttatcagaactgttcactttcagaaatgattttttaaagcattttgttgaaaatgcggttgcttttttaacattattttagagttgtatcaaaattttcctgttttctgtatattgttgtgtcatttcttggctttttaatattttgactacaatgccctaatgcgaagaagtatggacatataaatattacaagagaaattagttaatagtaaagggttaaaaggtaagtaaaatgtccatgaaaataaaattttctttgaacagtttaaaaatggaatcacaaaaatctaactgcacttgaaatgaaactggaaattttatactaattaaatcctttatttaccttttcatattttatcaatggaaccttttaattgctccttctatatcactcttctccttgcttggctgatctcattacatgactttcgttacagacagtgtgagtgtactagatttgtttgctgctaatccgttattttaagtgttgtcagaaggaaataacttcttggtttgaccaagtaattttgcaaagtccttctctacctgataacacgtgaatgtatagcagtaaaggtgaaaattgcaggccttgttttgttcttcatacccccttcagttgtttatgggttaatgttatttgaaaactcttcctttttttaatgtgtaaaaacaatccaaagagataaatccttgcatagacaccaaaaacagtgtctcagagaccttttcattttttccttagttaataactgtagtggatgtgaaaacaaacgagttgaattttaaaacatagcatttattagtgctatacagtcacattcctttcagccagtagtaaagttaaacagatgagtgatacagtacctgaatggtactgcttctgaggcaacactttggattgaaagtgctgcttttggttaaaggaactatgttgtggaaagcatattccagtgtaaatttgcagatgtgtgttttttttttttgtcacttttcataaggtttggagtaagttgcagtggcttttgatcatagtttagcccatttaatggtccttttacctagaatgttcttaagcagttaatgacaatttggaatacacagataacttgtagcttaagatactattttcatttaattctcctgtggagaatattgctttattttttactagtttcaggtcagttattaaaataaacatggaggttttaatgaatgttgtataatattttatagtgaaggaaaattgtggaaagggcaaagactttctctttcccttatgtatttaactgtgccaatctaaatacatactgttttatacaatgagatgcattacaagacttttctgttggagtgctctcgacattttggttttcatacctgaatgatcattgcattttctgtattttctaaaatggctccaattttgtgttttaagcttcagcttaagaggaagtttatgttctaattcttgactgagaatacagtattgagattctctgttttacagataacaactggtttttattactcattaagttcatttgcatcccgtagccctctgtaaatgtttcccctagttgtatgtacgtaaatgcacgcttatccagtgtatattagacatttttgtgctaaaatatattaagtgggatttttgtagcaaagcattctatttttctgttcttacagtgtgtgtgtgtgtgtgtgtgtgtgtgtatgcgtttttttaaccttaacttcagtttaaacactggtgtatttatttttttaagcaacttgactcttagaagccttagactgattttttcaataaatattcaaccaaaaattataaatttattaagatgtggccttacatatggcattccttgtgttcgtaatgtgagatttttgatttagataaatcaagattcaggattaaagtttcattgtaagttgaaatagaaaatgtattaaaatgtctaggcttctgggaggaagttcttatactcttctttcttggcattagaaagaagcaatatgaatttttgtgaatattctaaatattcaggcaacactgttcagattgatttaggtttgtcttaaccaatgttctttttttagaatttcaggttgtggcattcactgagtatgcagctactatggtttttgtatgggacgtataaatacttgattatatacgacagattttaatgtctttaaagacttcctgctgtattaacatattgtaatggagtcttttaaatactaggttgaatttaattgaagtcacacacatcttgaagtggtaactgcatagtaaatactaccaagagtttttttcacgtgggagtatcctaaaactctgccatgggtgtaaatgttttacattaatttcataattggacagaccctgcatttagcgaaaacattttgttttgaaagtgtgttctttttgtcgcactgttactgcgtaacacttctcaacattctgtaagttaaattattttaaaataactatggtgaattcatgtttatttttttactttgaaaattgtagtactcaggtggtatttaatgggaaaggatcctttgggtataaatcataatgtattttaaggaatgcatctataacattgataactttagccttaaaaaaaaggtctattattccttcctctgcatcccatggtatattagcaaagtagtttacagccctgtacagccttacaaagttgttttacaatttttaatggaaagcccttaacaacaacaacaaaaaattgtatcattttaccaatatccacgaattactgatcacagtttgtaaataatttgtttaatatcagaaggccaaagaaagtcttaaaattttagctattgactctatggtgacttcacaataagatttctgtgcaaaaaggtaaggtgataattgatctaatagacttttttttttttttttttgctgtccatgagaattagacttcatattagcttcaattaaaaagctcattccattttattaaaatgtttgtaattgcaattttgtgtttaatgtttactttgtctttcctttctttagcatttaggtgactgttcggcagtttgatatatggccattgtcggccttaaactgcactagtaacaagcatggtatttatcttgtattgaaaataaaacaaacttttgataagaaaaaaaaaaaaaaa

SEQ ID NO: 28 - protein, 551 aa, Homo sapiens
MADGVDHIDIYADVGEEFNQEAEYGGHDQIDLYDDVISPSANNGDAPEDRDYMDTLPPTVGDDVGKGAAPNVVYTYTGKRIALYIGNLTWWTTDEDLTEAVHSLGVNDILEIKFFENRANGQSKGFALVGVGSEASSKKLMDLLPKRELHGQNPVVTPCNKQFLSQFEMQSRKTTQSGQMSGEGKAGPPGGSSRAAFPQGGRGRGRFPGAVPGGDRFPGPAGPGGPPPPFPAGQTPPRPPLGPPGPPGPPGPPPPGQVLPPPLAGPPNRGDRPPPPVLFPGQPFGQPPLGPLPPGPPPPVPGYGPPPGPPPPQQGPPPPPGPFPPRPPGPLGPPLTLAPPPHLPGPPPGAPPPAPHVNPAFFPPPTNSGMPTSDSRGPPPTDPYGRPPPYDRGDYGPPGREMDTARTPLSEAEFEEIMNRNRAISSSAISRAVSDASAGDYGSAIETLVTAISLIKQSKVSADDRCKVLISSLQDCLHGIESKSYGSGSRRERSRERDHSRSREKSRRHKSRSRDRHDDYYRERSRERERHRDRDRDRDRERDREREYRHR

SEQ ID NO: 29 - DNA, 13882 bp, Homo sapiens
ctcggtggcggcggcggcggccggctccaggccgggttttggcgccgcccgcctgctgcctcctggcggctcctgaactccagccccctctctatcagccgctcactccgtctcaatatgtctcaagatggcggccaatgtgggatcgatgtttcaatattggaagcgctttgatttacagcagctgcagagagaactcgatgccaccgcaacggtattggcgaaccggcaggatgaaagtgagcagtccagaaagcggcttatcgaacagagccgggagttcaagaagaacactccagaggatttgcgcaagcaggtagcgccgctgctgaagagtttccaaggagagattgatgcactgagtaaaagaagcaaggaagctgaagcagctttcttgaatgtctacaaaagattgattgacgtcccagatcccgtaccagctttggatctcggacagcaactccagctcaaagtgcagcgcctgcacgatattgaaacagagaaccagaaacttagggaaactctggaagaatacaacaaggaatttgctgaagtgaaaaatcaagaggttacgataaaagcacttaaagagaaaatccgagaatatgaacagacactgaagaaccaagccgaaaccatagctcttgagaaggaacagaagttacagaatgactttgcagaaaaggagagaaagctgcaggagacacagatgtccaccacctcaaagctggaggaagctgagcataaggttcagagcctacaaacagccctggaaaaaactcgaacagaattatttgacctgaaaaccaaatacgatgaagaaactactgcaaaggccgacgagattgaaatgatcatgacggaccttgaaagggcaaaccagagggcagaggtggctcagagagaggcggagaccttaagggaacagctctcatcggccaatcactccctccagctggcctcacagatccagaaggcaccagacgtggagcaggccatagaggtgctgacccgctccagcctagaagttgagttggccgccaaggagcgggagatcgcacagctggtggaggacgtgcagagactccaggccagcctcaccaagctgcgggagaattcggccagccagatctcacagcttgagcagcagctgagcgccaaaaacagcacactcaaacaactggaagaaaaactcaaaggccaggctgactatgaagaggtgaagaaagagctgaacattctgaagtccatggagtttgcaccgtccgagggcgctgggacacaggatgcggccaagcccctggaggtgctgttgctggagaagaaccgctcgctgcagtccgagaacgccgcgctgcgcatctccaacagcgacctgagcgggtcagccaggaggaaagggaaagaccagcctgaaagtcggcgcccgggatctttgccggccccccctccttctcagttgccccgcaacccgggggagcaggcttccaatactaatggtacacaccagttctcaccagcggggttaagtcaagactttttcagctcatccctggcaagccccagcctacccctggcttctacaggaaaatttgcactaaactctcttctccagcggcagctaatgcagtccttctactccaaggctatgcaggaagccggaagcacaagcatgattttttcaacaggtccatacagcacaaactccatatcttcccaaagtccattacaacaaagcccagatgtcaatggcatggccccatcccccagccagtcagaaagtgctgggagcgtctccgagggcgaggagatggacactgcagaaatcgcccggcaggtcaaagagcagctgattaagcacaatatcggacaacgtattttcggacattatgtgttgggactgtctcaagggtccgtgagcgagattctggcccggcccaagccatggaataaactgactgttcgtggcaaggagccatttcacaagatgaaacagttcctctccgatgagcagaacatcctggccctccgtagcatccaaggcagacaaagagagaatccaggccagagcctgaacagactatttcaggaagtaccgaaacgaagaaatgggtctgaaggtaacatcaccacccggatccgagcctcggagactggctctgatgaagccatcaagtccatcctagagcaagccaagagggagctccaagtgcagaaaactgcagagccggcccagccttcctccgcatccggcagcgggaactctgatgacgccatccgctccatcctgcagcaagcccgccgggagatggaggcccagcaggctgccctcgaccctgccttaaagcaggcaccactgtcccagagtgacatcaccatcctcacccccaagcttctgtccacctcgcccatgcccaccgtgtccagctacccacctctcgccatctccctgaagaagccctccgcagctcctgaggccggtgcctctgctctgccgaaccccccggccctcaaaaaggaggcccaggacgcccccgggctggacccccagggagcagccgattgtgcacaaggggtcctgagacaggtgaaaaatgaggtgggccgcagcggtgcctggaaggaccactggtggagcgcggtgcagccggagagaagaaatgccgcctcctccgaggaggccaaggccgaagaaacgggcggcgggaaagagaagggcagcggtggcagcggaggtggcagccagcctcgggccgagcgcagtcagctccagggaccctcgtcgtcagagtactggaaggagtggcccagcgctgagtccccatactcccagagctcagagctgagtctgaccggggccagccgcagcgagacaccacagaacagccccctgccatcctccccgatcgtgcccatgtccaagcccaccaagccctcggtccccccgctgacccccgagcagtacgaggtctacatgtaccaggaggtggacaccatcgagctcacccggcaggttaaggaaaagctggccaagaacggcatctgccagagaatcttcggggagaaggtgctgggcctgtcccagggcagcgtcagcgacatgctgtcccgaccgaagccatggagcaagctgacgcagaaaggccgagaacccttcatccggatgcagctctggctgaacggcgagctaggccagggtgttctacccgtccagggccagcagcaagggccagtcctccactccgtgacatcgctccaggacccgctgcagcagggctgtgtgagctcagaaagcactccaaagacctccgccagctgcagccctgcccctgagtccccgatgagttccagtgagtcggtgaagagcctgaccgagctggtccagcagccctgtccccccatcgaggcgagcaaggacagcaagccaccagagcccagtgacccgccagcatccgactcccagcccacaaccccgctgcctctctccggacactcggccctcagcatccaagaattagtagccatgtccccggagctggacacctacggcataaccaagcgggtgaaggaggtgctgacggacaacaacctcggccagcgcttatttggggagaccatcttagggctcacccaaggctctgtctctgacctccttgcccgccccaaaccctggcataagctcagtctgaaaggacgagagcccttcgtccggatgcagctgtggctgaacgaccccaacaatgtggagaagctgatggacatgaaacggatggagaagaaagcctacatgaagcggcggcacagctcagtcagtgacagccagccctgcgaaccgccctctgtcggcaccgagtacagccagggcgccagcccccagccccagcaccagctgaagaaaccccgggtggtgctggctccggaggagaaggaggcgctgaaacgagcgtatcagcaaaagccatacccgtcaccaaaaaccatcgaagacctcgccacccagctcaacctgaaaaccagcaccgtcatcaactggttccacaactacaggtctcggatccgcagagaactgttcattgaggaaattcaggccgggagtcagggccaggcgggcgccagcgactcaccctcggcccgcagcggccgggcggcgcccagctcggagggcgacagctgcgacggcgtggaggccactgagggcccaggcagcgccgacaccgaggagcccaagtctcagggagaggccgagcgggaggaggtgccgcggccggcggagcagacggagccgccgccctcggggaccccgggcccggacgacgcccgcgacgacgaccacgagggaggccccgtggaaggcccggggcccctgcccagccccgcctccgcgaccgccaccgccgcgcccgcggcccccgaggacgccgctacctcagccgccgccgcgccgggggagggccccgcggccccgagctccgcgccgccgcccagcaacagcagcagcagcagcgccccccgcaggcccagctcgctgcagagccttttcggcctccccgaggccgcgggcgcccgggactcgcgcgacaaccccctgcgcaagaagaaggccgcgaacttgaacagcatcatccaccgcctggagaaggccgccagccgggaggaacctatcgaatgggagttctgaggggccgcggccctggggcgggcagccaggctgggccgcaagggcctggacggggtcggacggggcaggcgctgcggacaccgtggcctgggcttggcccgcggcctgcaccgaccccgggccggacctgagcccgcagcccagaccccctccacggtccgcggcctgcaccgacccgaggcccagatccaaggccgcggcccagacccactctgcggcccgggccgaccctgcggcctccaccaaccccgcggcccagacccagcccgcggcctggacccctggaccgctttgcgcacttaccgccctgcgggccacagggcaaaatcgccataggccaaggtgcatatagaaaacaaaggagcattaagcccaatctatgtcgtgttttcaaggaagaaaacggaaatgtgtggtcgagcttttttgtaccctgaagtgttttttttattgccctaagtgatttccacaggttctggaataactcttacagctttgccttgtgtcctcctgttccgtgtgggctttaaaagaaaaaaaatcaaacccacatattaaaagggggctttttatctgccatctaatggcttcagagcgataatacactattatcttcttaaaccaggaaaaaataaaagggggggtgggatttttcagaaaaattaaaaaagaaagtttttgtagctgttcagttgccactaagagattgcacagtcaaaacgactctaaacacactagtttggattcctaaatattttcaagaaaagaatcttctcgtttgaaactttgaattaaaataaaacacatttactccacatattttttaacaaaaagaaaacgtcacatcaggaaactctgattttgtggtagctgacatagtgttttcttgtacgtgaatagaatcctgacatgtagtgcacattgatgtatagctttaactgaccctgggttttgcagaccagggtttgtttaatacactccattctaggccaaatcaggacaaaaaaaagaaaaaaaaagaaaaaaaaaaaagaaaagatccgaatctaggtattttataatctgctttttaacctctaaccgcagagcacgctgatcagacctcatatcttggaggtttaggagacaagttagaactgtagcatgtacctgttaattttgtttaatttatggtgtctcaatctgtctgtgcgtctgcacgtgtgcaagcattgaaagaaaggagagagtagtccgggcgagcacagcaggcagttccagggccagacgggcccatccccaagtagatagcagtctacggatctctctctggcacagaaggcacctcacctcacaccactctcctggatacctgatgaactgagccctcccaggggaagacactccccaggcctgggcagggcttacacgcgcactctctctcttctttccctttttcttcccaccgcaagcactgatgaccctgttgaactcgtgggaaacttcctttctctgcaggagagagaacgtggcattctgggctccccactcccatccctgtagaaatggcccaaactcacaccaaaacgtggatgctcttcaacttccaaacctaccatttgcccttctttcatttcgcctcttagttctttttatgcacagttttagggcagtctaagtacaaactgaaagtctaacttgtctctgattcctcccttgtctatgtgtatatgcgtgagaatagaggcgggtgagagtgtgcgtgcgtgtgcgtgtgtgcaattttatacgtctgtgtattttcttaagtacctgtgcacacgtagagtgcattactgccacctttttcaataagctgttttatcagttacggcttctacaagtttgctaatttagacttctttattgccatatctttaaactaacaatagatgatttcggtatatatatatatttttttttgcttatttataggtgctgtattttattatctgattgttaggaagggatgaaaggggcaaatattctttagagggatagactgccggcagtattgggtataatttacaagatgtagttgtcatactgtatattactgattgaaaactttttgaccgtattgtgtatcattgaaacctttgtcttaggtcaacatctttggatgacattttaatggtgcattcattatttcttaagtttaattaatattacttttttttttatttggggggtgggagggagttataattttaaaggtatgctctggctgttccacctccgtgtgcttgttaattaacttgtaggactttgactgtaagatgtgaaaccacgtttcttgcatgatgttttagagattatttcatttacagtcttttaacctgcagctgcagcacttagttcacgttttcacaaatttcaagagtcactacactaaagacaatgccttttcatgaataagaagttttcagaaggctctagggggctgggaggcaggctgttcgtttgtcttttgttgggggtatcatttctgaacttgaaatccagttcagggagaagagaattcaaaattagaggagcttaaggggacacgggtcaacatctagctcgattcaggtgcattgagaagagtgagttcacatcggtgacccttaggacagtgagtggcagagccctgacgactgtggtgtcctctccacaaaaccctcaagggacttttgtcatcatgtgtgatgaatctttaaatatcgtctaattttcataagaatgaaaagaagttaacaggaaatagtaggctagggtttagttttaaaggcatgactgttatttacaaaggtgttaaatctgaggaaattgacaaatacagatttgtccattctagtggccaaacagtaacagtctaaaatgcagtcattttgaccctcccaagcaatttagtcatatgtgttgttttctcttttctgtttttacttcttagatttttaactaggttactgttggttcccattctgtcttttttgccagacttacatctggtgccagatacaatcagttggttaaattttgcttgcagttctgtgtattttttttcctctattatttatttttttaaaaaaaatagagatcctaaccttagatctttgatgtgaagctagcactgtctgtaatacttctaagagctgccactaaaataatacagcaatccgtggccaggggagcaccccctcctggttgggcccctcagttggagtctaagggttaatctctcatcttgctaagcagtattcaagtgccttgaacagtgtcccctcggcatggctccccttcagcaggctggcattccaagcagtggcccccgcaggcagccgacccccttcctcttcacgctctatgagtttaaaaagctgatttgtacctctcccctgggggaaacggttccatataaaacactaacacttaattacaagctccattatgccattttaaatggcttctttttgttaattggaggcattgttcataacttaaggcttttgccattaacttagctggctaagcagaggctcggggtaaaatcagtgtttgcatttagcctcttgacccggagttccggcccaagctcccttgtgatagccgagatggcaggtgtgtgagttctgtcctagacctgtgcccaactcacttccaccccagaggagtcttctgtcctcctccccaacccccgagctccctggtaacctcctcttgaacttctgtatcagtgaagacatctgtggtttctgctcaccagacctctctttagaaagggttatcagagccatggagcttagctcaattggattcttctagacgatcttaggaggcatcttggcatgaggcagcttctaagcgtctcctgggacaggattggggtgacagcccagggatgcatgcatgggagaactctctgagaaatgccaggatcgtggctcacagggacccaccatcaaaacctgctactttgtgcaagtaattgaggcaaaagataccagtcgacagcctccctggggtagatcccttgtacctccaaagtacaaatacctccctgctcagtttccttcctgtcgccatctttgttttcttcccattgaaaaaccatcctgtctgatgtggacgttcaggtctgctggttggcggtccgggcccagagtgcagcagagctctgggttaaatattcctttctggccaccgcccaagcccaggtggccagctctcataccccatctccctccttggccagggccagcatcaggcgtgcagctcatgaccagtttacacaggctgcaaagagatcgctgtgggcctcggctgactactttaagattatgccacagccaggccctaaaaagagaggggaacaggagtccccaggtgagctctctgacgggcaggtgccttcccgactaaggttggactggatgactttgttcctcctgcatgcatgtcctttgatgcaagggtgatcaatgaactctgttgacattctatgcaatgtttttcattcctctgattttagcaaagcaaatcttactgaaaaatagcagagccaggggaacagacgcatgtccttctgggagtcacacaaaagcagagagattttgaactgaggggcgacagcctttgccttaaatgcagtatgacaggcgcttcttggcagaccagtaaaaacaaaagcccatagaccttactcatcccaaggccgacaagccagctgtacagggcgagatgtagcaacacggggcatgagcggtgggcgtgctgggctatttgctgtggtactttaggctggaggtttggctcctgtgctgccggtggggggccctgtccctccccagatgtcctccctcttcttcacactcctcattgtcccttctacctcactaacctgtcttctccatctgatgtcacccagaaccacaccccacagaactgtgaggcacgtgggctggagagagcagaaaagctgccagcgcagcagacacgaacatccctctgcctggtgggccggctttgtgtgtctctccttttgtgagcgcaacacggacaaacagctgtgctctgcaaggcacacggatgtttcccttccacctgttcccaaagctccagcagctgtttcttttgcaggcagggcgtggtctcggggctccgagggtcttgtctttggtccgccttcctttctgtccagtcctgctcagctgttaagatccatcatggccattatccttgtcccggactgccccaaagttcccagctggctttggggaacactgtagctcttgggtgtctcttgtctctggcatggttttagcgtcactgcgaacactcctttgcaaacatcaaacatctcaaagacggaaaaggatagatggcttcctccagcctacacgccccgtccacagtggcatcaccctcttatcccaaaagaatatgccagttcccatccagcaccgaagaaaatcagctcctggggctggtggttggaggtgggtctgtccactgtgggggccaaagtgttcccctgctggagacagtttgcaagtaagaacctaaggatggggacagcatcctgtgcttgggcattgaccagccaaagctcacatttagaaagccctcagtgcttctgtggtttcacctgggcatcgacgacattagggaagcctttgtgaccacaagggcagggcttgtgccctgagtggcgaggtggtgacctgaggccagtgtgatgtggttggatctcagcgtgtactgaatgccagtctggccggcacactcgaacgctaagagaatggtccaatttgatgatcttatttctatttcgatcaggttttgactttttgtagatgaaaactaccagggaaaaggggaagcaggtacccaataaagtttagaaagatccagtctgtgaaacccttagagatgggctgaaagttaagtccaccaacccttgggcttaatcaggacggaagaggagggggtgtggggggcagagcgtaaaacaagccccagccctactcccggccccccagcccagtcttcccaatcccagaggccccggcggcctgtgctcctcaccaccctggtcaggggaatagaaggaaatgcaatttccgcctgtctgcccgacttccaaaaactgcctcctcctgcccaggcctctcccaccaccaccttccctccaaagataaccgtgtccatgccatccgtggcatcatctcgagttttcatttttggatgaagtgacatttagctttaacaagacatttccaaagcgcctagtctcctccaaaatgctaactttaaaagttgggcattgtaggcgaaaaatcccaaaaaaaaaaaaagacaaaaaaaaaaggctggcgagagaaagacatttggctatgcataaatgtgcacttcccccatgcccccgttcttaaactcttaagatgcctttgagttgcttttcatgaatccttttagtttacccgataatgttaagaaagcattagtctacgttactgtaatttctgtagtgtttacgctttaatttctaccacaaaatatgctatatgctatgtatcaagctttctgtaatcagaaagaaaaggtgccttatatcccaatgtcacggctacatccctatggaaattaatcagaagcacagtgtgtacggaagcattgggacttctgctggtgaaacaagagaccattcagcaagacacattgaagtggcacggagctgcttttgttttataattcttttttccccccttttccttcttcttttttattattttattattttttttgtactttgctttaaacggaaagcacttaaatagatgactatgtgtaaaagctctgtgcaattgaaatcatttttcttcattttaaaaaaataacgtattgcacaccaaatgaactcaaagtaagctttagaccaggacgattcaggttatgaatgagtttgttcactgtagttccgtttgttcatgaaccgaagggaaaacaggcctccccgactccctccagtctcccagcctgcctcttggtgaccactgtgctgggcgtgcagggcccgcgggctctggccggagccgctggcctgacgaggcaggatagggagtatccgtgattcagaagctgagacccttccccagtgtctgaggccacagccatcccttccagcacttaatcttgtcttgttgaaatggactgactgctactgacctgccggcgtgcgtgagggtgattataaaaggatgtttccttgagaaaaaaaaaattatttctatcctcttctatttattattaggttaatcatttaagtacttatcaggagtgtattgttattttgtgttttgttgtcataaatgctttttgctgtcactctagtggttactatcctctgccttcctctcctcccctactcccccagagaaccaaggcgtctgggggattgactggggggcagagggggtttccccagcaaaatcaaacacctgtctccagagtagccactcaaaaactggtggtctctatgtgtctaactttttaaatgagagtgtttatgaacaaaaaaatttaccaacgtgtgagggagttgctgagttgaagaatgctcgcttgaggagcttcagaggaatcttagcaaagccaagttcagttccccaaagcctcctagagcctctggtaagacttctgggttcatgaagtttcggcgagccgtggtcagagagggcgcggtggcctggccaagactttacctccaagcgagagagtgatttcttgcaaggcccgcatgggttgatacgttttggttggttttttgttgttgtttttcttgcgtacaaagttggtcaaaaccatctttcaaagcaacagtgttttgtagtaccaggctgtggcttgagggctcacctaggagatcataggcagagggcccctttcccctataggtggttcaacgtggaggaaggttgggtgtggagattgcttgctgtggccccaagctcagccagcaggacacccagttgttgccaatcaggtgtgaaggtgaggcgccctgccttgatcccatgggcccagcagaaggaaacttaccccaggccaaggcaagggccctgctcaccccaaggtaggctgggaagagcatctctttccatatcatcacctccccttctccaagattgccgggggccctgattttgttctctctttgaaagaaaccctccaccgaaacaatggtccccatctccccagaagcctttttttttttcatttttctctaattagtctatgcatttctctctctcaaaccatcttctgcctcttcccttgagaaaacgggcatctcacgtacccccatctgagacctcttggaaaaaaaaaatcccgtgtattctggagatgtgagaattcacccaaaattcttaaaacattggagaatagcttgttataaaataaaagtgggggtaaaaagaaggtggttttccccacatccctttgcattgaataagagacctagttctttgcgtttgtgcaataactctttgctgcttgccttgagagcgggtagcaccacgctcctgtccagactactaacagcacaagacgcactcacagggtggcggaatcttccggaaaactctctataagctcagctccccccaccccacccccactctagcgttttgtcacgtcttacattttagcagtattttatattttctgtaacgcaccaagtcttagatctttctagagcttgtttgttcatcctcacaatcacagatttttttctccaatcctcacagagacccaattgaccaaaaaagaaaaaaggaaaaaaaaaaagtcgtcttttttttttttttttgtacaaatcgctttgagatgcctctggtgtgttgctgtgtgacatctctctggtaacattttatttcttgctatttgtttttctacattaagagtcaaagttgacctggctggcgtgggggtgggggaggcacccgtcggccccttggtgttgtccctctgtctttggttagccatacgatgtttgttctcagcactgtacaacggtccctatataatacggagaagcaatatcactgtatgagactcacaccatgtattattattcactagcaccctaggtgtgataattgaagtaaatatcttttatacaaacacaaaaaaaaaaaaaaa

SEQ ID NO: 30 - protein, 1516 aa, Homo sapiens
MAANVGSMFQYWKRFDLQQLQRELDATATVLANRQDESEQSRKRLIEQSREFKKNTPEDLRKQVAPLLKSFQGEIDALSKRSKEAEAAFLNVYKRLIDVPDPVPALDLGQQLQLKVQRLHDIETENQKLRETLEEYNKEFAEVKNQEVTIKALKEKIREYEQTLKNQAETIALEKEQKLQNDFAEKERKLQETQMSTTSKLEEAEHKVQSLQTALEKTRTELFDLKTKYDEETTAKADEIEMIMTDLERANQRAEVAQREAETLREQLSSANHSLQLASQIQKAPDVEQAIEVLTRSSLEVELAAKEREIAQLVEDVQRLQASLTKLRENSASQISQLEQQLSAKNSTLKQLEEKLKGQADYEEVKKELNILKSMEFAPSEGAGTQDAAKPLEVLLLEKNRSLQSENAALRISNSDLSGSARRKGKDQPESRRPGSLPAPPPSQLPRNPGEQASNTNGTHQFSPAGLSQDFFSSSLASPSLPLASTGKFALNSLLQRQLMQSFYSKAMQEAGSTSMIFSTGPYSTNSISSQSPLQQSPDVNGMAPSPSQSESAGSVSEGEEMDTAEIARQVKEQLIKHNIGQRIFGHYVLGLSQGSVSEILARPKPWNKLTVRGKEPFHKMKQFLSDEQNILALRSIQGRQRENPGQSLNRLFQEVPKRRNGSEGNITTRIRASETGSDEAIKSILEQAKRELQVQKTAEPAQPSSASGSGNSDDAIRSILQQARREMEAQQAALDPALKQAPLSQSDITILTPKLLSTSPMPTVSSYPPLAISLKKPSAAPEAGASALPNPPALKKEAQDAPGLDPQGAADCAQGVLRQVKNEVGRSGAWKDHWWSAVQPERRNAASSEEAKAEETGGGKEKGSGGSGGGSQPRAERSQLQGPSSSEYWKEWPSAESPYSQSSELSLTGASRSETPQNSPLPSSPIVPMSKPTKPSVPPLTPEQYEVYMYQEVDTIELTRQVKEKLAKNGICQRIFGEKVLGLSQGSVSDMLSRPKPWSKLTQKGREPFIRMQLWLNGELGQGVLPVQGQQQGPVLHSVTSLQDPLQQGCVSSESTPKTSASCSPAPESPMSSSESVKSLTELVQQPCPPIEASKDSKPPEPSDPPASDSQPTTPLPLSGHSALSIQELVAMSPELDTYGITKRVKEVLTDNNLGQRLFGETILGLTQGSVSDLLARPKPWHKLSLKGREPFVRMQLWLNDPNNVEKLMDMKRMEKKAYMKRRHSSVSDSQPCEPPSVGTEYSQGASPQPQHQLKKPRVVLAPEEKEALKRAYQQKPYPSPKTIEDLATQLNLKTSTVINWFHNYRSRIRRELFIEEIQAGSQGQAGASDSPSARSGRAAPSSEGDSCDGVEATEGPGSADTEEPKSQGEAEREEVPRPAEQTEPPPSGTPGPDDARDDDHEGGPVEGPGPLPSPASATATAAPAAPEDAATSAAAAPGEGPAAPSSAPPPSNSSSSSAPRRPSSLQSLFGLPEAAGARDSRDNPLRKKKAANLNSIIHRLEKAASREEPIEWEF

SEQ ID NO: 31 - DNA, 2991 bp, Homo sapiens
ctcggtggcggcggcggcggccggctccaggccgggttttggcgccgcccgcctgctgcctcctggcggctcctgaactccagccccctctctatcagccgctcactccgtctcaatatgtctcaagatggcggccaatgtgggatcgatgtttcaatattggaagcgctttgatttacagcagctgcagagagaactcgatgccaccgcaacggtattggcgaaccggcaggatgaaagtgagcagtccagaaagcggcttatcgaacagagccgggagttcaagaagaacactccagagattgatgcactgagtaaaagaagcaaggaagctgaagcagctttcttgaatgtctacaaaagattgattgacgtcccagatcccgtaccagctttggatctcggacagcaactccagctcaaagtgcagcgcctgcacgatattgaaacagagaaccagaaacttagggaaactctggaagaatacaacaaggaatttgctgaagtgaaaaatcaagaggttacgataaaagcacttaaagagaaaatccgagaatatgaacagacactgaagaaccaagccgaaaccatagctcttgagaaggaacagaagttacagaatgactttgcagaaaaggagagaaagctgcaggagacacagatgtccaccacctcaaagctggaggaagctgagcataaggttcagagcctacaaacagccctggaaaaaactcgaacagaattatttgacctgaaaaccaaatacgatgaagaaactactgcaaaggccgacgagattgaaatgatcatgacggaccttgaaagggcaaaccagagggcagaggtggctcagagagaggcggagaccttaagggaacagctctcatcggccaatcactccctccagctggcctcacagatccagaaggcaccagacgtggagcaggccatagaggtgctgacccgctccagcctagaagttgagttggccgccaaggagcgggagatcgcacagctggtggaggacgtgcagagactccaggccagcctcaccaagctgcgggagaattcggccagccagatctcacagcttgagcagcagctgagcgccaaaaacagcacactcaaacaactggaagaaaaactcaaaggccaggctgactatgaagaggtgaagaaagagctgaacattctgaagtccatggagtttgcaccgtccgagggcgctgggacacaggatgcggccaagcccctggaggtgctgttgctggagaagaaccgctcgctgcagtccgagaacgccgcgctgcgcatctccaacagcgacctgagcggacgctgtgcagagctgcaagtccgtatcactgaggctgtggccacagccactgagcagagagagctgatcgcccgcctggagcaggacctgagcatcattcagtccatccagcggcccgatgccgagggtgccgctgagcaccgcctggagaagatcccagagcccatcaaagaggccactgccctattctacggacctgcagcaccagccagcggtgccctcccagagggccaggtggattcactgctttccatcatctccagccagagggagcgcttccgtgcccggaaccaggagcttgaggccgagaaccgcctggcccagcacaccctccaggccctgcagagtgagctggacagcctgcgcgccgacaacatcaagctctttgagaagatcaagttcctgcagagctaccctggccggggcagcggcagtgatgacacggagctgcggtactcgtcccagtacgaggagcgcctggaccccttctcctccttcagcaagcgggagcggcagaggaagtacctgagcttgagtccctgggacaaggccaccctcagcatggggcgtctggttctctccaacaagatggcgcgcaccatcggcttcttctacacactgttcctgcactgcctggtcttcctggtgctctacaagctggcatggagcgagagcatggagagggactgtgccaccttctgcgccaagaagttcgctgaccacctgcacaagttccacgagaatgacaacggggctgcggctggtgacttgtggcagtgataccccggggcctcccccgtgacagtgacggctgcgcctccaccccgactgctcagtgcatctaatcacttagactcccctgaagaatcccccatggaaactgcccttatccgctgtccagcagctgccagaggccccaggtcacctcgggtccccttgaaagaatgtctcggtcacatcaggcccgctaggtccagagagcgagcccccaatgcccggccaggctaagccgcagagaccctctcagcccccacctcaggttagggctctgcccgcagcctgacctctagccctggtggcagaggtccctcagctgcgaggctaattgggtgaccaccgattccagctgcggttaatccagcttgggcctgtctgcactgcgatcctcttgggctctcctaggatccccccatgccccgtaagaggtggaagacgcttccttccaggacagcaggctttgagtccagcacccccagcctgcctttgccaccagccccaccctgcagagtatatgaggcttgacagagtctgccccctcccccactgcaccccaagagagagagccccagccagcggaacagtttctattaccccctccctgcccccagacccatgtgatttctgctttcttctttagcaagatattctggtttctagataaggaagagtctctaatgagcccccgagccccagtctcttcagactcatggattggtctgaggggtctgaacgtctcctagccaatcagaactggctgtggaccaccctagcacggccacctctcagggccactggcaggccttcctgagttagatttgtagttgcatatttagctttgcacatttgaaataaaccacggttgcagccaaaaaaaa

SEQ ID NO: 32 - protein, 662 aa, Homo sapiens
MAANVGSMFQYWKRFDLQQLQRELDATATVLANRQDESEQSRKRLIEQSREFKKNTPEIDALSKRSKEAEAAFLNVYKRLIDVPDPVPALDLGQQLQLKVQRLHDIETENQKLRETLEEYNKEFAEVKNQEVTIKALKEKIREYEQTLKNQAETIALEKEQKLQNDFAEKERKLQETQMSTTSKLEEAEHKVQSLQTALEKTRTELFDLKTKYDEETTAKADEIEMIMTDLERANQRAEVAQREAETLREQLSSANHSLQLASQIQKAPDVEQAIEVLTRSSLEVELAAKEREIAQLVEDVQRLQASLTKLRENSASQISQLEQQLSAKNSTLKQLEEKLKGQADYEEVKKELNILKSMEFAPSEGAGTQDAAKPLEVLLLEKNRSLQSENAALRISNSDLSGRCAELQVRITEAVATATEQRELIARLEQDLSIIQSIQRPDAEGAAEHRLEKIPEPIKEATALFYGPAAPASGALPEGQVDSLLSIISSQRERFRARNQELEAENRLAQHTLQALQSELDSLRADNIKLFEKIKFLQSYPGRGSGSDDTELRYSSQYEERLDPFSSFSKRERQRKYLSLSPWDKATLSMGRLVLSNKMARTIGFFYTLFLHCLVFLVLYKLAWSESMERDCATFCAKKFADHLHKFHENDNGAAAGDLWQ

SEQ ID NO: 33 - DNA, 2901 bp, Homo sapiens
ctcggtggcggcggcggcggccggctccaggccgggttttggcgccgcccgcctgctgcctcctggcggctcctgaactccagccccctctctatcagccgctcactccgtctcaatatgtctcaagatggcggccaatgtgggatcgatgtttcaatattggaagcgctttgatttacagcagctgcagagagaactcgatgccaccgcaacggtattggcgaaccggcaggatgaaagtgagcagtccagaaagcggcttatcgaacagagccgggagttcaagaagaacactccagaggatttgcgcaagcaggtagcgccgctgctgaagagtttccaaggagagattgatgcactgagtaaaagaagcaaggaagctgaagcagctttcttgaatgtctacaaaagattgattgacgtcccagaggttacgataaaagcacttaaagagaaaatccgagaatatgaacagacactgaagaaccaagccgaaaccatagctcttgagaaggaacagaagttacagaatgactttgcagaaaaggagagaaagctgcaggagacacagatgtccaccacctcaaagctggaggaagctgagcataaggttcagagcctacaaacagccctggaaaaaactcgaacagaattatttgacctgaaaaccaaatacgatgaagaaactactgcaaaggccgacgagattgaaatgatcatgacggaccttgaaagggcaaaccagagggcagaggtggctcagagagaggcggagaccttaagggaacagctctcatcggccaatcactccctccagctggcctcacagatccagaaggcaccagacgtggagcaggccatagaggtgctgacccgctccagcctagaagttgagttggccgccaaggagcgggagatcgcacagctggtggaggacgtgcagagactccaggccagcctcaccaagctgcgggagaattcggccagccagatctcacagcttgagcagcagctgagcgccaaaaacagcacactcaaacaactggaagaaaaactcaaaggccaggctgactatgaagaggtgaagaaagagctgaacattctgaagtccatggagtttgcaccgtccgagggcgctgggacacaggatgcggccaagcccctggaggtgctgttgctggagaagaaccgctcgctgcagtccgagaacgccgcgctgcgcatctccaacagcgacctgagcggacgctgtgcagagctgcaagtccgtatcactgaggctgtggccacagccactgagcagagagagctgatcgcccgcctggagcaggacctgagcatcattcagtccatccagcggcccgatgccgagggtgccgctgagcaccgcctggagaagatcccagagcccatcaaagaggccactgccctattctacggacctgcagcaccagccagcggtgccctcccagagggccaggtggattcactgctttccatcatctccagccagagggagcgcttccgtgcccggaaccaggagcttgaggccgagaaccgcctggcccagcacaccctccaggccctgcagagtgagctggacagcctgcgcgccgacaacatcaagctctttgagaagatcaagttcctgcagagctaccctggccggggcagcggcagtgatgacacggagctgcggtactcgtcccagtacgaggagcgcctggaccccttctcctccttcagcaagcgggagcggcagaggaagtacctgagcttgagtccctgggacaaggccaccctcagcatggggcgtctggttctctccaacaagatggcgcgcaccatcggcttcttctacacactgttcctgcactgcctggtcttcctggtgctctacaagctggcatggagcgagagcatggagagggactgtgccaccttctgcgccaagaagttcgctgaccacctgcacaagttccacgagaatgacaacggggctgcggctggtgacttgtggcagtgataccccggggcctcccccgtgacagtgacggctgcgcctccaccccgactgctcagtgcatctaatcacttagactcccctgaagaatcccccatggaaactgcccttatccgctgtccagcagctgccagaggccccaggtcacctcgggtccccttgaaagaatgtctcggtcacatcaggcccgctaggtccagagagcgagcccccaatgcccggccaggctaagccgcagagaccctctcagcccccacctcaggttagggctctgcccgcagcctgacctctagccctggtggcagaggtccctcagctgcgaggctaattgggtgaccaccgattccagctgcggttaatccagcttgggcctgtctgcactgcgatcctcttgggctctcctaggatccccccatgccccgtaagaggtggaagacgcttccttccaggacagcaggctttgagtccagcacccccagcctgcctttgccaccagccccaccctgcagagtatatgaggcttgacagagtctgccccctcccccactgcaccccaagagagagagccccagccagcggaacagtttctattaccccctccctgcccccagacccatgtgatttctgctttcttctttagcaagatattctggtttctagataaggaagagtctctaatgagcccccgagccccagtctcttcagactcatggattggtctgaggggtctgaacgtctcctagccaatcagaactggctgtggaccaccctagcacggccacctctcagggccactggcaggccttcctgagttagatttgtagttgcatatttagctttgcacatttgaaataaaccacggttgcagccaaaaaaaa

SEQ ID NO: 34 - protein, 632 aa, Homo sapiens
MAANVGSMFQYWKRFDLQQLQRELDATATVLANRQDESEQSRKRLIEQSREFKKNTPEDLRKQVAPLLKSFQGEIDALSKRSKEAEAAFLNVYKRLIDVPEVTIKALKEKIREYEQTLKNQAETIALEKEQKLQNDFAEKERKLQETQMSTTSKLEEAEHKVQSLQTALEKTRTELFDLKTKYDEETTAKADEIEMIMTDLERANQRAEVAQREAETLREQLSSANHSLQLASQIQKAPDVEQAIEVLTRSSLEVELAAKEREIAQLVEDVQRLQASLTKLRENSASQISQLEQQLSAKNSTLKQLEEKLKGQADYEEVKKELNILKSMEFAPSEGAGTQDAAKPLEVLLLEKNRSLQSENAALRISNSDLSGRCAELQVRITEAVATATEQRELIARLEQDLSIIQSIQRPDAEGAAEHRLEKIPEPIKEATALFYGPAAPASGALPEGQVDSLLSIISSQRERFRARNQELEAENRLAQHTLQALQSELDSLRADNIKLFEKIKFLQSYPGRGSGSDDTELRYSSQYEERLDPFSSFSKRERQRKYLSLSPWDKATLSMGRLVLSNKMARTIGFFYTLFLHCLVFLVLYKLAWSESMERDCATFCAKKFADHLHKFHENDNGAAAGDLWQ

SEQ ID NO: 35 - DNA, 2818 bp, Homo sapiens
actccgtctcaatatgtctcaagatggcggccaatgtgggatcgatgtttcaatattggaagcgctttgatttacagcagctgcaggatttgcgcaagcaggtagcgccgctgctgaagagtttccaaggagagattgatgcactgagtaaaagaagcaaggaagctgaagcagctttcttgaatgtctacaaaagattgattgacgtcccagatcccgtaccagctttggatctcggacagcaactccagctcaaagtgcagcgcctgcacgatattgaaacagagaaccagaaacttagggaaactctggaagaatacaacaaggaatttgctgaagtgaaaaatcaagaggttacgataaaagcacttaaagagaaaatccgagaatatgaacagacactgaagaaccaagccgaaaccatagctcttgagaaggaacagaagttacagaatgactttgcagaaaaggagagaaagctgcaggagacacagatgtccaccacctcaaagctggaggaagctgagcataaggttcagagcctacaaacagccctggaaaaaactcgaacagaattatttgacctgaaaaccaaatacgatgaagaaactactgcaaaggccgacgagattgaaatgatcatgacggaccttgaaagggcaaaccagagggcagaggtggctcagagagaggcggagaccttaagggaacagctctcatcggccaatcactccctccagctggcctcacagatccagaaggcaccagacgtggccatagaggtgctgacccgctccagcctagaagttgagttggccgccaaggagcgggagatcgcacagctggtggaggacgtgcagagactccaggccagcctcaccaagctgcgggagaattcggccagccagatctcacagcttgagcagcagctgagcgccaaaaacagcacactcaaacaactggaagaaaaactcaaaggccaggctgactatgaagaggtgaagaaagagctgaacattctgaagtccatggagtttgcaccgtccgagggcgctgggacacaggatgcggccaagcccctggaggtgctgttgctggagaagaaccgctcgctgcagtccgagaacgccgcgctgcgcatctccaacagcgacctgagcggacgctgtgcagagctgcaagtccgtatcactgaggctgtggccacagccactgagcagagagagctgatcgcccgcctggagcaggacctgagcatcattcagtccatccagcggcccgatgccgagggtgccgctgagcaccgcctggagaagatcccagagcccatcaaagaggccactgccctattctacggacctgcagcaccagccagcggtgccctcccagagggccaggtggattcactgctttccatcatctccagccagagggagcgcttccgtgcccggaaccaggagcttgaggccgagaaccgcctggcccagcacaccctccaggccctgcagagtgagctggacagcctgcgcgccgacaacatcaagctctttgagaagatcaagttcctgcagagctaccctggccggggcagcggcagtgatgacacggagctgcggtactcgtcccagtacgaggagcgcctggaccccttctcctccttcagcaagcgggagcggcagaggaagtacctgagcttgagtccctgggacaaggccaccctcagcatggggcgtctggttctctccaacaagatggcgcgcaccatcggcttcttctacacactgttcctgcactgcctggtcttcctggtgctctacaagctggcatggagcgagagcatggagagggactgtgccaccttctgcgccaagaagttcgctgaccacctgcacaagttccacgagaatgacaacggggctgcggctggtgacttgtggcagtgataccccggggcctcccccgtgacagtgacggctgcgcctccaccccgactgctcagtgcatctaatcacttagactcccctgaagaatcccccatggaaactgcccttatccgctgtccagcagctgccagaggccccaggtcacctcgggtccccttgaaagaatgtctcggtcacatcaggcccgctaggtccagagagcgagcccccaatgcccggccaggctaagccgcagagaccctctcagcccccacctcaggttagggctctgcccgcagcctgacctctagccctggtggcagaggtccctcagctgcgaggctaattgggtgaccaccgattccagctgcggttaatccagcttgggcctgtctgcactgcgatcctcttgggctctcctaggatccccccatgccccgtaagaggtggaagacgcttccttccaggacagcaggctttgagtccagcacccccagcctgcctttgccaccagccccaccctgcagagtatatgaggcttgacagagtctgccccctcccccactgcaccccaagagagagagccccagccagcggaacagtttctattaccccctccctgcccccagacccatgtgatttctgctttcttctttagcaagatattctggtttctagataaggaagagtctctaatgagcccccgagccccagtctcttcagactcatggattggtctgaggggtctgaacgtctcctagccaatcagaactggctgtggaccaccctagcacggccacctctcagggccactggcaggccttcctgagttagatttgtagttgcatatttagctttgcacatttgaaataaaccacggttgcagccaaaaaaaa

SEQ ID NO: 36 - protein, 639 aa, Homo sapiens
MAANVGSMFQYWKRFDLQQLQDLRKQVAPLLKSFQGEIDALSKRSKEAEAAFLNVYKRLIDVPDPVPALDLGQQLQLKVQRLHDIETENQKLRETLEEYNKEFAEVKNQEVTIKALKEKIREYEQTLKNQAETIALEKEQKLQNDFAEKERKLQETQMSTTSKLEEAEHKVQSLQTALEKTRTELFDLKTKYDEETTAKADEIEMIMTDLERANQRAEVAQREAETLREQLSSANHSLQLASQIQKAPDVAIEVLTRSSLEVELAAKEREIAQLVEDVQRLQASLTKLRENSASQISQLEQQLSAKNSTLKQLEEKLKGQADYEEVKKELNILKSMEFAPSEGAGTQDAAKPLEVLLLEKNRSLQSENAALRISNSDLSGRCAELQVRITEAVATATEQRELIARLEQDLSIIQSIQRPDAEGAAEHRLEKIPEPIKEATALFYGPAAPASGALPEGQVDSLLSIISSQRERFRARNQELEAENRLAQHTLQALQSELDSLRADNIKLFEKIKFLQSYPGRGSGSDDTELRYSSQYEERLDPFSSFSKRERQRKYLSLSPWDKATLSMGRLVLSNKMARTIGFFYTLFLHCLVFLVLYKLAWSESMERDCATFCAKKFADHLHKFHENDNGAAAGDLWQ

SEQ ID NO: 37 - DNA, 3039 bp, Homo sapiens
ctcggtggcggcggcggcggccggctccaggccgggttttggcgccgcccgcctgctgcctcctggcggctcctgaactccagccccctctctatcagccgctcactccgtctcaatatgtctcaagatggcggccaatgtgggatcgatgtttcaatattggaagcgctttgatttacagcagctgcagagagaactcgatgccaccgcaacggtattggcgaaccggcaggatgaaagtgagcagtccagaaagcggcttatcgaacagagccgggagttcaagaagaacactccagaggatttgcgcaagcaggtagcgccgctgctgaagagtttccaaggagagattgatgcactgagtaaaagaagcaaggaagctgaagcagctttcttgaatgtctacaaaagattgattgacgtcccagatcccgtaccagctttggatctcggacagcaactccagctcaaagtgcagcgcctgcacgatattgaaacagagaaccagaaacttagggaaactctggaagaatacaacaaggaatttgctgaagtgaaaaatcaagaggttacgataaaagcacttaaagagaaaatccgagaatatgaacagacactgaagaaccaagccgaaaccatagctcttgagaaggaacagaagttacagaatgactttgcagaaaaggagagaaagctgcaggagacacagatgtccaccacctcaaagctggaggaagctgagcataaggttcagagcctacaaacagccctggaaaaaactcgaacagaattatttgacctgaaaaccaaatacgatgaagaaactactgcaaaggccgacgagattgaaatgatcatgacggaccttgaaagggcaaaccagagggcagaggtggctcagagagaggcggagaccttaagggaacagctctcatcggccaatcactccctccagctggcctcacagatccagaaggcaccagacgtggagcaggccatagaggtgctgacccgctccagcctagaagttgagttggccgccaaggagcgggagatcgcacagctggtggaggacgtgcagagactccaggccagcctcaccaagctgcgggagaattcggccagccagatctcacagcttgagcagcagctgagcgccaaaaacagcacactcaaacaactggaagaaaaactcaaaggccaggctgactatgaagaggtgaagaaagagctgaacattctgaagtccatggagtttgcaccgtccgagggcgctgggacacaggatgcggccaagcccctggaggtgctgttgctggagaagaaccgctcgctgcagtccgagaacgccgcgctgcgcatctccaacagcgacctgagcggacgctgtgcagagctgcaagtccgtatcactgaggctgtggccacagccactgagcagagagagctgatcgcccgcctggagcaggacctgagcatcattcagtccatccagcggcccgatgccgagggtgccgctgagcaccgcctggagaagatcccagagcccatcaaagaggccactgccctattctacggacctgcagcaccagccagcggtgccctcccagagggccaggtggattcactgctttccatcatctccagccagagggagcgcttccgtgcccggaaccaggagcttgaggccgagaaccgcctggcccagcacaccctccaggccctgcagagtgagctggacagcctgcgcgccgacaacatcaagctctttgagaagatcaagttcctgcagagctaccctggccggggcagcggcagtgatgacacggagctgcggtactcgtcccagtacgaggagcgcctggaccccttctcctccttcagcaagcgggagcggcagaggaagtacctgagcttgagtccctgggacaaggccaccctcagcatggggcgtctggttctctccaacaagatggcgcgcaccatcggcttcttctacacactgttcctgcactgcctggtcttcctggtgctctacaagctggcatggagcgagagcatggagagggactgtgccaccttctgcgccaagaagttcgctgaccacctgcacaagttccacgagaatgacaacggggctgcggctggtgacttgtggcagtgataccccggggcctcccccgtgacagtgacggctgcgcctccaccccgactgctcagtgcatctaatcacttagactcccctgaagaatcccccatggaaactgcccttatccgctgtccagcagctgccagaggccccaggtcacctcgggtccccttgaaagaatgtctcggtcacatcaggcccgctaggtccagagagcgagcccccaatgcccggccaggctaagccgcagagaccctctcagcccccacctcaggttagggctctgcccgcagcctgacctctagccctggtggcagaggtccctcagctgcgaggctaattgggtgaccaccgattccagctgcggttaatccagcttgggcctgtctgcactgcgatcctcttgggctctcctaggatccccccatgccccgtaagaggtggaagacgcttccttccaggacagcaggctttgagtccagcacccccagcctgcctttgccaccagccccaccctgcagagtatatgaggcttgacagagtctgccccctcccccactgcaccccaagagagagagccccagccagcggaacagtttctattaccccctccctgcccccagacccatgtgatttctgctttcttctttagcaagatattctggtttctagataaggaagagtctctaatgagcccccgagccccagtctcttcagactcatggattggtctgaggggtctgaacgtctcctagccaatcagaactggctgtggaccaccctagcacggccacctctcagggccactggcaggccttcctgagttagatttgtagttgcatatttagctttgcacatttgaaataaaccacggttgcagccaaaaaaaa

SEQ ID NO: 38 - protein, 678 aa, Homo sapiens
MAANVGSMFQYWKRFDLQQLQRELDATATVLANRQDESEQSRKRLIEQSREFKKNTPEDLRKQVAPLLKSFQGEIDALSKRSKEAEAAFLNVYKRLIDVPDPVPALDLGQQLQLKVQRLHDIETENQKLRETLEEYNKEFAEVKNQEVTIKALKEKIREYEQTLKNQAETIALEKEQKLQNDFAEKERKLQETQMSTTSKLEEAEHKVQSLQTALEKTRTELFDLKTKYDEETTAKADEIEMIMTDLERANQRAEVAQREAETLREQLSSANHSLQLASQIQKAPDVEQAIEVLTRSSLEVELAAKEREIAQLVEDVQRLQASLTKLRENSASQISQLEQQLSAKNSTLKQLEEKLKGQADYEEVKKELNILKSMEFAPSEGAGTQDAAKPLEVLLLEKNRSLQSENAALRISNSDLSGRCAELQVRITEAVATATEQRELIARLEQDLSIIQSIQRPDAEGAAEHRLEKIPEPIKEATALFYGPAAPASGALPEGQVDSLLSIISSQRERFRARNQELEAENRLAQHTLQALQSELDSLRADNIKLFEKIKFLQSYPGRGSGSDDTELRYSSQYEERLDPFSSFSKRERQRKYLSLSPWDKATLSMGRLVLSNKMARTIGFFYTLFLHCLVFLVLYKLAWSESMERDCATFCAKKFADHLHKFHENDNGAAAGDLWQ

SEQ ID NO: 39 - DNA, 3033 bp, Homo sapiens
ctcggtggcggcggcggcggccggctccaggccgggttttggcgccgcccgcctgctgcctcctggcggctcctgaactccagccccctctctatcagccgctcactccgtctcaatatgtctcaagatggcggccaatgtgggatcgatgtttcaatattggaagcgctttgatttacagcagctgcagagagaactcgatgccaccgcaacggtattggcgaaccggcaggatgaaagtgagcagtccagaaagcggcttatcgaacagagccgggagttcaagaagaacactccagaggatttgcgcaagcaggtagcgccgctgctgaagagtttccaaggagagattgatgcactgagtaaaagaagcaaggaagctgaagcagctttcttgaatgtctacaaaagattgattgacgtcccagatcccgtaccagctttggatctcggacagcaactccagctcaaagtgcagcgcctgcacgatattgaaacagagaaccagaaacttagggaaactctggaagaatacaacaaggaatttgctgaagtgaaaaatcaagaggttacgataaaagcacttaaagagaaaatccgagaatatgaacagacactgaagaaccaagccgaaaccatagctcttgagaaggaacagaagttacagaatgactttgcagaaaaggagagaaagctgcaggagacacagatgtccaccacctcaaagctggaggaagctgagcataaggttcagagcctacaaacagccctggaaaaaactcgaacagaattatttgacctgaaaaccaaatacgatgaagaaactactgcaaaggccgacgagattgaaatgatcatgacggaccttgaaagggcaaaccagagggcagaggtggctcagagagaggcggagaccttaagggaacagctctcatcggccaatcactccctccagctggcctcacagatccagaaggcaccagacgtggccatagaggtgctgacccgctccagcctagaagttgagttggccgccaaggagcgggagatcgcacagctggtggaggacgtgcagagactccaggccagcctcaccaagctgcgggagaattcggccagccagatctcacagcttgagcagcagctgagcgccaaaaacagcacactcaaacaactggaagaaaaactcaaaggccaggctgactatgaagaggtgaagaaagagctgaacattctgaagtccatggagtttgcaccgtccgagggcgctgggacacaggatgcggccaagcccctggaggtgctgttgctggagaagaaccgctcgctgcagtccgagaacgccgcgctgcgcatctccaacagcgacctgagcggacgctgtgcagagctgcaagtccgtatcactgaggctgtggccacagccactgagcagagagagctgatcgcccgcctggagcaggacctgagcatcattcagtccatccagcggcccgatgccgagggtgccgctgagcaccgcctggagaagatcccagagcccatcaaagaggccactgccctattctacggacctgcagcaccagccagcggtgccctcccagagggccaggtggattcactgctttccatcatctccagccagagggagcgcttccgtgcccggaaccaggagcttgaggccgagaaccgcctggcccagcacaccctccaggccctgcagagtgagctggacagcctgcgcgccgacaacatcaagctctttgagaagatcaagttcctgcagagctaccctggccggggcagcggcagtgatgacacggagctgcggtactcgtcccagtacgaggagcgcctggaccccttctcctccttcagcaagcgggagcggcagaggaagtacctgagcttgagtccctgggacaaggccaccctcagcatggggcgtctggttctctccaacaagatggcgcgcaccatcggcttcttctacacactgttcctgcactgcctggtcttcctggtgctctacaagctggcatggagcgagagcatggagagggactgtgccaccttctgcgccaagaagttcgctgaccacctgcacaagttccacgagaatgacaacggggctgcggctggtgacttgtggcagtgataccccggggcctcccccgtgacagtgacggctgcgcctccaccccgactgctcagtgcatctaatcacttagactcccctgaagaatcccccatggaaactgcccttatccgctgtccagcagctgccagaggccccaggtcacctcgggtccccttgaaagaatgtctcggtcacatcaggcccgctaggtccagagagcgagcccccaatgcccggccaggctaagccgcagagaccctctcagcccccacctcaggttagggctctgcccgcagcctgacctctagccctggtggcagaggtccctcagctgcgaggctaattgggtgaccaccgattccagctgcggttaatccagcttgggcctgtctgcactgcgatcctcttgggctctcctaggatccccccatgccccgtaagaggtggaagacgcttccttccaggacagcaggctttgagtccagcacccccagcctgcctttgccaccagccccaccctgcagagtatatgaggcttgacagagtctgccccctcccccactgcaccccaagagagagagccccagccagcggaacagtttctattaccccctccctgcccccagacccatgtgatttctgctttcttctttagcaagatattctggtttctagataaggaagagtctctaatgagcccccgagccccagtctcttcagactcatggattggtctgaggggtctgaacgtctcctagccaatcagaactggctgtggaccaccctagcacggccacctctcagggccactggcaggccttcctgagttagatttgtagttgcatatttagctttgcacatttgaaataaaccacggttgcagccaaaaaaaa

SEQ ID NO: 40 - protein, 676 aa, Homo sapiens
MAANVGSMFQYWKRFDLQQLQRELDATATVLANRQDESEQSRKRLIEQSREFKKNTPEDLRKQVAPLLKSFQGEIDALSKRSKEAEAAFLNVYKRLIDVPDPVPALDLGQQLQLKVQRLHDIETENQKLRETLEEYNKEFAEVKNQEVTIKALKEKIREYEQTLKNQAETIALEKEQKLQNDFAEKERKLQETQMSTTSKLEEAEHKVQSLQTALEKTRTELFDLKTKYDEETTAKADEIEMIMTDLERANQRAEVAQREAETLREQLSSANHSLQLASQIQKAPDVAIEVLTRSSLEVELAAKEREIAQLVEDVQRLQASLTKLRENSASQISQLEQQLSAKNSTLKQLEEKLKGQADYEEVKKELNILKSMEFAPSEGAGTQDAAKPLEVLLLEKNRSLQSENAALRISNSDLSGRCAELQVRITEAVATATEQRELIARLEQDLSIIQSIQRPDAEGAAEHRLEKIPEPIKEATALFYGPAAPASGALPEGQVDSLLSIISSQRERFRARNQELEAENRLAQHTLQALQSELDSLRADNIKLFEKIKFLQSYPGRGSGSDDTELRYSSQYEERLDPFSSFSKRERQRKYLSLSPWDKATLSMGRLVLSNKMARTIGFFYTLFLHCLVFLVLYKLAWSESMERDCATFCAKKFADHLHKFHENDNGAAAGDLWQ

SEQ ID NO: 41 - DNA, 13760 bp, Homo sapiens
ccgcggcgccgggacagccccgggactctgccaggtggatgttgtgcgtagccggagccaggttgaagagagaactcgatgccaccgcaacggtattggcgaaccggcaggatgaaagtgagcagtccagaaagcggcttatcgaacagagccgggagttcaagaagaacactccagaggatttgcgcaagcaggtagcgccgctgctgaagagtttccaaggagagattgatgcactgagtaaaagaagcaaggaagctgaagcagctttcttgaatgtctacaaaagattgattgacgtcccagatcccgtaccagctttggatctcggacagcaactccagctcaaagtgcagcgcctgcacgatattgaaacagagaaccagaaacttagggaaactctggaagaatacaacaaggaatttgctgaagtgaaaaatcaagaggttacgataaaagcacttaaagagaaaatccgagaatatgaacagacactgaagaaccaagccgaaaccatagctcttgagaaggaacagaagttacagaatgactttgcagaaaaggagagaaagctgcaggagacacagatgtccaccacctcaaagctggaggaagctgagcataaggttcagagcctacaaacagccctggaaaaaactcgaacagaattatttgacctgaaaaccaaatacgatgaagaaactactgcaaaggccgacgagattgaaatgatcatgacggaccttgaaagggcaaaccagagggcagaggtggctcagagagaggcggagaccttaagggaacagctctcatcggccaatcactccctccagctggcctcacagatccagaaggcaccagacgtggagcaggccatagaggtgctgacccgctccagcctagaagttgagttggccgccaaggagcgggagatcgcacagctggtggaggacgtgcagagactccaggccagcctcaccaagctgcgggagaattcggccagccagatctcacagcttgagcagcagctgagcgccaaaaacagcacactcaaacaactggaagaaaaactcaaaggccaggctgactatgaagaggtgaagaaagagctgaacattctgaagtccatggagtttgcaccgtccgagggcgctgggacacaggatgcggccaagcccctggaggtgctgttgctggagaagaaccgctcgctgcagtccgagaacgccgcgctgcgcatctccaacagcgacctgagcgggtcagccaggaggaaagggaaagaccagcctgaaagtcggcgcccgggatctttgccggccccccctccttctcagttgccccgcaacccgggggagcaggcttccaatactaatggtacacaccagttctcaccagcggggttaagtcaagactttttcagctcatccctggcaagccccagcctacccctggcttctacaggaaaatttgcactaaactctcttctccagcggcagctaatgcagtccttctactccaaggctatgcaggaagccggaagcacaagcatgattttttcaacaggtccatacagcacaaactccatatcttcccaaagtccattacaacaaagcccagatgtcaatggcatggccccatcccccagccagtcagaaagtgctgggagcgtctccgagggcgaggagatggacactgcagaaatcgcccggcaggtcaaagagcagctgattaagcacaatatcggacaacgtattttcggacattatgtgttgggactgtctcaagggtccgtgagcgagattctggcccggcccaagccatggaataaactgactgttcgtggcaaggagccatttcacaagatgaaacagttcctctccgatgagcagaacatcctggccctccgtagcatccaaggcagacaaagagagaatccaggccagagcctgaacagactatttcaggaagtaccgaaacgaagaaatgggtctgaaggtaacatcaccacccggatccgagcctcggagactggctctgatgaagccatcaagtccatcctagagcaagccaagagggagctccaagtgcagaaaactgcagagccggcccagccttcctccgcatccggcagcgggaactctgatgacgccatccgctccatcctgcagcaagcccgccgggagatggaggcccagcaggctgccctcgaccctgccttaaagcaggcaccactgtcccagagtgacatcaccatcctcacccccaagcttctgtccacctcgcccatgcccaccgtgtccagctacccacctctcgccatctccctgaagaagccctccgcagctcctgaggccggtgcctctgctctgccgaaccccccggccctcaaaaaggaggcccaggacgcccccgggctggacccccagggagcagccgattgtgcacaaggggtcctgagacaggtgaaaaatgaggtgggccgcagcggtgcctggaaggaccactggtggagcgcggtgcagccggagagaagaaatgccgcctcctccgaggaggccaaggccgaagaaacgggcggcgggaaagagaagggcagcggtggcagcggaggtggcagccagcctcgggccgagcgcagtcagctccagggaccctcgtcgtcagagtactggaaggagtggcccagcgctgagtccccatactcccagagctcagagctgagtctgaccggggccagccgcagcgagacaccacagaacagccccctgccatcctccccgatcgtgcccatgtccaagcccaccaagccctcggtccccccgctgacccccgagcagtacgaggtctacatgtaccaggaggtggacaccatcgagctcacccggcaggttaaggaaaagctggccaagaacggcatctgccagagaatcttcggggagaaggtgctgggcctgtcccagggcagcgtcagcgacatgctgtcccgaccgaagccatggagcaagctgacgcagaaaggccgagaacccttcatccggatgcagctctggctgaacggcgagctaggccagggtgttctacccgtccagggccagcagcaagggccagtcctccactccgtgacatcgctccaggacccgctgcagcagggctgtgtgagctcagaaagcactccaaagacctccgccagctgcagccctgcccctgagtccccgatgagttccagtgagtcggtgaagagcctgaccgagctggtccagcagccctgtccccccatcgaggcgagcaaggacagcaagccaccagagcccagtgacccgccagcatccgactcccagcccacaaccccgctgcctctctccggacactcggccctcagcatccaagaattagtagccatgtccccggagctggacacctacggcataaccaagcgggtgaaggaggtgctgacggacaacaacctcggccagcgcttatttggggagaccatcttagggctcacccaaggctctgtctctgacctccttgcccgccccaaaccctggcataagctcagtctgaaaggacgagagcccttcgtccggatgcagctgtggctgaacgaccccaacaatgtggagaagctgatggacatgaaacggatggagaagaaagcctacatgaagcggcggcacagctcagtcagtgacagccagccctgcgaaccgccctctgtcggcaccgagtacagccagggcgccagcccccagccccagcaccagctgaagaaaccccgggtggtgctggctccggaggagaaggaggcgctgaaacgagcgtatcagcaaaagccatacccgtcaccaaaaaccatcgaagacctcgccacccagctcaacctgaaaaccagcaccgtcatcaactggttccacaactacaggtctcggatccgcagagaactgttcattgaggaaattcaggccgggagtcagggccaggcgggcgccagcgactcaccctcggcccgcagcggccgggcggcgcccagctcggagggcgacagctgcgacggcgtggaggccactgagggcccaggcagcgccgacaccgaggagcccaagtctcagggagaggccgagcgggaggaggtgccgcggccggcggagcagacggagccgccgccctcggggaccccgggcccggacgacgcccgcgacgacgaccacgagggaggccccgtggaaggcccggggcccctgcccagccccgcctccgcgaccgccaccgccgcgcccgcggcccccgaggacgccgctacctcagccgccgccgcgccgggggagggccccgcggccccgagctccgcgccgccgcccagcaacagcagcagcagcagcgccccccgcaggcccagctcgctgcagagccttttcggcctccccgaggccgcgggcgcccgggactcgcgcgacaaccccctgcgcaagaagaaggccgcgaacttgaacagcatcatccaccgcctggagaaggccgccagccgggaggaacctatcgaatgggagttctgaggggccgcggccctggggcgggcagccaggctgggccgcaagggcctggacggggtcggacggggcaggcgctgcggacaccgtggcctgggcttggcccgcggcctgcaccgaccccgggccggacctgagcccgcagcccagaccccctccacggtccgcggcctgcaccgacccgaggcccagatccaaggccgcggcccagacccactctgcggcccgggccgaccctgcggcctccaccaaccccgcggcccagacccagcccgcggcctggacccctggaccgctttgcgcacttaccgccctgcgggccacagggcaaaatcgccataggccaaggtgcatatagaaaacaaaggagcattaagcccaatctatgtcgtgttttcaaggaagaaaacggaaatgtgtggtcgagcttttttgtaccctgaagtgttttttttattgccctaagtgatttccacaggttctggaataactcttacagctttgccttgtgtcctcctgttccgtgtgggctttaaaagaaaaaaaatcaaacccacatattaaaagggggctttttatctgccatctaatggcttcagagcgataatacactattatcttcttaaaccaggaaaaaataaaagggggggtgggatttttcagaaaaattaaaaaagaaagtttttgtagctgttcagttgccactaagagattgcacagtcaaaacgactctaaacacactagtttggattcctaaatattttcaagaaaagaatcttctcgtttgaaactttgaattaaaataaaacacatttactccacatattttttaacaaaaagaaaacgtcacatcaggaaactctgattttgtggtagctgacatagtgttttcttgtacgtgaatagaatcctgacatgtagtgcacattgatgtatagctttaactgaccctgggttttgcagaccagggtttgtttaatacactccattctaggccaaatcaggacaaaaaaaagaaaaaaaaagaaaaaaaaaaaagaaaagatccgaatctaggtattttataatctgctttttaacctctaaccgcagagcacgctgatcagacctcatatcttggaggtttaggagacaagttagaactgtagcatgtacctgttaattttgtttaatttatggtgtctcaatctgtctgtgcgtctgcacgtgtgcaagcattgaaagaaaggagagagtagtccgggcgagcacagcaggcagttccagggccagacgggcccatccccaagtagatagcagtctacggatctctctctggcacagaaggcacctcacctcacaccactctcctggatacctgatgaactgagccctcccaggggaagacactccccaggcctgggcagggcttacacgcgcactctctctcttctttccctttttcttcccaccgcaagcactgatgaccctgttgaactcgtgggaaacttcctttctctgcaggagagagaacgtggcattctgggctccccactcccatccctgtagaaatggcccaaactcacaccaaaacgtggatgctcttcaacttccaaacctaccatttgcccttctttcatttcgcctcttagttctttttatgcacagttttagggcagtctaagtacaaactgaaagtctaacttgtctctgattcctcccttgtctatgtgtatatgcgtgagaatagaggcgggtgagagtgtgcgtgcgtgtgcgtgtgtgcaattttatacgtctgtgtattttcttaagtacctgtgcacacgtagagtgcattactgccacctttttcaataagctgttttatcagttacggcttctacaagtttgctaatttagacttctttattgccatatctttaaactaacaatagatgatttcggtatatatatatatttttttttgcttatttataggtgctgtattttattatctgattgttaggaagggatgaaaggggcaaatattctttagagggatagactgccggcagtattgggtataatttacaagatgtagttgtcatactgtatattactgattgaaaactttttgaccgtattgtgtatcattgaaacctttgtcttaggtcaacatctttggatgacattttaatggtgcattcattatttcttaagtttaattaatattacttttttttttatttggggggtgggagggagttataattttaaaggtatgctctggctgttccacctccgtgtgcttgttaattaacttgtaggactttgactgtaagatgtgaaaccacgtttcttgcatgatgttttagagattatttcatttacagtcttttaacctgcagctgcagcacttagttcacgttttcacaaatttcaagagtcactacactaaagacaatgccttttcatgaataagaagttttcagaaggctctagggggctgggaggcaggctgttcgtttgtcttttgttgggggtatcatttctgaacttgaaatccagttcagggagaagagaattcaaaattagaggagcttaaggggacacgggtcaacatctagctcgattcaggtgcattgagaagagtgagttcacatcggtgacccttaggacagtgagtggcagagccctgacgactgtggtgtcctctccacaaaaccctcaagggacttttgtcatcatgtgtgatgaatctttaaatatcgtctaattttcataagaatgaaaagaagttaacaggaaatagtaggctagggtttagttttaaaggcatgactgttatttacaaaggtgttaaatctgaggaaattgacaaatacagatttgtccattctagtggccaaacagtaacagtctaaaatgcagtcattttgaccctcccaagcaatttagtcatatgtgttgttttctcttttctgtttttacttcttagatttttaactaggttactgttggttcccattctgtcttttttgccagacttacatctggtgccagatacaatcagttggttaaattttgcttgcagttctgtgtattttttttcctctattatttatttttttaaaaaaaatagagatcctaaccttagatctttgatgtgaagctagcactgtctgtaatacttctaagagctgccactaaaataatacagcaatccgtggccaggggagcaccccctcctggttgggcccctcagttggagtctaagggttaatctctcatcttgctaagcagtattcaagtgccttgaacagtgtcccctcggcatggctccccttcagcaggctggcattccaagcagtggcccccgcaggcagccgacccccttcctcttcacgctctatgagtttaaaaagctgatttgtacctctcccctgggggaaacggttccatataaaacactaacacttaattacaagctccattatgccattttaaatggcttctttttgttaattggaggcattgttcataacttaaggcttttgccattaacttagctggctaagcagaggctcggggtaaaatcagtgtttgcatttagcctcttgacccggagttccggcccaagctcccttgtgatagccgagatggcaggtgtgtgagttctgtcctagacctgtgcccaactcacttccaccccagaggagtcttctgtcctcctccccaacccccgagctccctggtaacctcctcttgaacttctgtatcagtgaagacatctgtggtttctgctcaccagacctctctttagaaagggttatcagagccatggagcttagctcaattggattcttctagacgatcttaggaggcatcttggcatgaggcagcttctaagcgtctcctgggacaggattggggtgacagcccagggatgcatgcatgggagaactctctgagaaatgccaggatcgtggctcacagggacccaccatcaaaacctgctactttgtgcaagtaattgaggcaaaagataccagtcgacagcctccctggggtagatcccttgtacctccaaagtacaaatacctccctgctcagtttccttcctgtcgccatctttgttttcttcccattgaaaaaccatcctgtctgatgtggacgttcaggtctgctggttggcggtccgggcccagagtgcagcagagctctgggttaaatattcctttctggccaccgcccaagcccaggtggccagctctcataccccatctccctccttggccagggccagcatcaggcgtgcagctcatgaccagtttacacaggctgcaaagagatcgctgtgggcctcggctgactactttaagattatgccacagccaggccctaaaaagagaggggaacaggagtccccaggtgagctctctgacgggcaggtgccttcccgactaaggttggactggatgactttgttcctcctgcatgcatgtcctttgatgcaagggtgatcaatgaactctgttgacattctatgcaatgtttttcattcctctgattttagcaaagcaaatcttactgaaaaatagcagagccaggggaacagacgcatgtccttctgggagtcacacaaaagcagagagattttgaactgaggggcgacagcctttgccttaaatgcagtatgacaggcgcttcttggcagaccagtaaaaacaaaagcccatagaccttactcatcccaaggccgacaagccagctgtacagggcgagatgtagcaacacggggcatgagcggtgggcgtgctgggctatttgctgtggtactttaggctggaggtttggctcctgtgctgccggtggggggccctgtccctccccagatgtcctccctcttcttcacactcctcattgtcccttctacctcactaacctgtcttctccatctgatgtcacccagaaccacaccccacagaactgtgaggcacgtgggctggagagagcagaaaagctgccagcgcagcagacacgaacatccctctgcctggtgggccggctttgtgtgtctctccttttgtgagcgcaacacggacaaacagctgtgctctgcaaggcacacggatgtttcccttccacctgttcccaaagctccagcagctgtttcttttgcaggcagggcgtggtctcggggctccgagggtcttgtctttggtccgccttcctttctgtccagtcctgctcagctgttaagatccatcatggccattatccttgtcccggactgccccaaagttcccagctggctttggggaacactgtagctcttgggtgtctcttgtctctggcatggttttagcgtcactgcgaacactcctttgcaaacatcaaacatctcaaagacggaaaaggatagatggcttcctccagcctacacgccccgtccacagtggcatcaccctcttatcccaaaagaatatgccagttcccatccagcaccgaagaaaatcagctcctggggctggtggttggaggtgggtctgtccactgtgggggccaaagtgttcccctgctggagacagtttgcaagtaagaacctaaggatggggacagcatcctgtgcttgggcattgaccagccaaagctcacatttagaaagccctcagtgcttctgtggtttcacctgggcatcgacgacattagggaagcctttgtgaccacaagggcagggcttgtgccctgagtggcgaggtggtgacctgaggccagtgtgatgtggttggatctcagcgtgtactgaatgccagtctggccggcacactcgaacgctaagagaatggtccaatttgatgatcttatttctatttcgatcaggttttgactttttgtagatgaaaactaccagggaaaaggggaagcaggtacccaataaagtttagaaagatccagtctgtgaaacccttagagatgggctgaaagttaagtccaccaacccttgggcttaatcaggacggaagaggagggggtgtggggggcagagcgtaaaacaagccccagccctactcccggccccccagcccagtcttcccaatcccagaggccccggcggcctgtgctcctcaccaccctggtcaggggaatagaaggaaatgcaatttccgcctgtctgcccgacttccaaaaactgcctcctcctgcccaggcctctcccaccaccaccttccctccaaagataaccgtgtccatgccatccgtggcatcatctcgagttttcatttttggatgaagtgacatttagctttaacaagacatttccaaagcgcctagtctcctccaaaatgctaactttaaaagttgggcattgtaggcgaaaaatcccaaaaaaaaaaaaagacaaaaaaaaaaggctggcgagagaaagacatttggctatgcataaatgtgcacttcccccatgcccccgttcttaaactcttaagatgcctttgagttgcttttcatgaatccttttagtttacccgataatgttaagaaagcattagtctacgttactgtaatttctgtagtgtttacgctttaatttctaccacaaaatatgctatatgctatgtatcaagctttctgtaatcagaaagaaaaggtgccttatatcccaatgtcacggctacatccctatggaaattaatcagaagcacagtgtgtacggaagcattgggacttctgctggtgaaacaagagaccattcagcaagacacattgaagtggcacggagctgcttttgttttataattcttttttccccccttttccttcttcttttttattattttattattttttttgtactttgctttaaacggaaagcacttaaatagatgactatgtgtaaaagctctgtgcaattgaaatcatttttcttcattttaaaaaaataacgtattgcacaccaaatgaactcaaagtaagctttagaccaggacgattcaggttatgaatgagtttgttcactgtagttccgtttgttcatgaaccgaagggaaaacaggcctccccgactccctccagtctcccagcctgcctcttggtgaccactgtgctgggcgtgcagggcccgcgggctctggccggagccgctggcctgacgaggcaggatagggagtatccgtgattcagaagctgagacccttccccagtgtctgaggccacagccatcccttccagcacttaatcttgtcttgttgaaatggactgactgctactgacctgccggcgtgcgtgagggtgattataaaaggatgtttccttgagaaaaaaaaaattatttctatcctcttctatttattattaggttaatcatttaagtacttatcaggagtgtattgttattttgtgttttgttgtcataaatgctttttgctgtcactctagtggttactatcctctgccttcctctcctcccctactcccccagagaaccaaggcgtctgggggattgactggggggcagagggggtttccccagcaaaatcaaacacctgtctccagagtagccactcaaaaactggtggtctctatgtgtctaactttttaaatgagagtgtttatgaacaaaaaaatttaccaacgtgtgagggagttgctgagttgaagaatgctcgcttgaggagcttcagaggaatcttagcaaagccaagttcagttccccaaagcctcctagagcctctggtaagacttctgggttcatgaagtttcggcgagccgtggtcagagagggcgcggtggcctggccaagactttacctccaagcgagagagtgatttcttgcaaggcccgcatgggttgatacgttttggttggttttttgttgttgtttttcttgcgtacaaagttggtcaaaaccatctttcaaagcaacagtgttttgtagtaccaggctgtggcttgagggctcacctaggagatcataggcagagggcccctttcccctataggtggttcaacgtggaggaaggttgggtgtggagattgcttgctgtggccccaagctcagccagcaggacacccagttgttgccaatcaggtgtgaaggtgaggcgccctgccttgatcccatgggcccagcagaaggaaacttaccccaggccaaggcaagggccctgctcaccccaaggtaggctgggaagagcatctctttccatatcatcacctccccttctccaagattgccgggggccctgattttgttctctctttgaaagaaaccctccaccgaaacaatggtccccatctccccagaagcctttttttttttcatttttctctaattagtctatgcatttctctctctcaaaccatcttctgcctcttcccttgagaaaacgggcatctcacgtacccccatctgagacctcttggaaaaaaaaaatcccgtgtattctggagatgtgagaattcacccaaaattcttaaaacattggagaatagcttgttataaaataaaagtgggggtaaaaagaaggtggttttccccacatccctttgcattgaataagagacctagttctttgcgtttgtgcaataactctttgctgcttgccttgagagcgggtagcaccacgctcctgtccagactactaacagcacaagacgcactcacagggtggcggaatcttccggaaaactctctataagctcagctccccccaccccacccccactctagcgttttgtcacgtcttacattttagcagtattttatattttctgtaacgcaccaagtcttagatctttctagagcttgtttgttcatcctcacaatcacagatttttttctccaatcctcacagagacccaattgaccaaaaaagaaaaaaggaaaaaaaaaaagtcgtcttttttttttttttttgtacaaatcgctttgagatgcctctggtgtgttgctgtgtgacatctctctggtaacattttatttcttgctatttgtttttctacattaagagtcaaagttgacctggctggcgtgggggtgggggaggcacccgtcggccccttggtgttgtccctctgtctttggttagccatacgatgtttgttctcagcactgtacaacggtccctatataatacggagaagcaatatcactgtatgagactcacaccatgtattattattcactagcaccctaggtgtgataattgaagtaaatatcttttatacaaacacaaaaaaaaaaaaaaa

SEQ ID NO: 42 - protein, 1505 aa, Homo sapiens
MLCVAGARLKRELDATATVLANRQDESEQSRKRLIEQSREFKKNTPEDLRKQVAPLLKSFQGEIDALSKRSKEAEAAFLNVYKRLIDVPDPVPALDLGQQLQLKVQRLHDIETENQKLRETLEEYNKEFAEVKNQEVTIKALKEKIREYEQTLKNQAETIALEKEQKLQNDFAEKERKLQETQMSTTSKLEEAEHKVQSLQTALEKTRTELFDLKTKYDEETTAKADEIEMIMTDLERANQRAEVAQREAETLREQLSSANHSLQLASQIQKAPDVEQAIEVLTRSSLEVELAAKEREIAQLVEDVQRLQASLTKLRENSASQISQLEQQLSAKNSTLKQLEEKLKGQADYEEVKKELNILKSMEFAPSEGAGTQDAAKPLEVLLLEKNRSLQSENAALRISNSDLSGSARRKGKDQPESRRPGSLPAPPPSQLPRNPGEQASNTNGTHQFSPAGLSQDFFSSSLASPSLPLASTGKFALNSLLQRQLMQSFYSKAMQEAGSTSMIFSTGPYSTNSISSQSPLQQSPDVNGMAPSPSQSESAGSVSEGEEMDTAEIARQVKEQLIKHNIGQRIFGHYVLGLSQGSVSEILARPKPWNKLTVRGKEPFHKMKQFLSDEQNILALRSIQGRQRENPGQSLNRLFQEVPKRRNGSEGNITTRIRASETGSDEAIKSILEQAKRELQVQKTAEPAQPSSASGSGNSDDAIRSILQQARREMEAQQAALDPALKQAPLSQSDITILTPKLLSTSPMPTVSSYPPLAISLKKPSAAPEAGASALPNPPALKKEAQDAPGLDPQGAADCAQGVLRQVKNEVGRSGAWKDHWWSAVQPERRNAASSEEAKAEETGGGKEKGSGGSGGGSQPRAERSQLQGPSSSEYWKEWPSAESPYSQSSELSLTGASRSETPQNSPLPSSPIVPMSKPTKPSVPPLTPEQYEVYMYQEVDTIELTRQVKEKLAKNGICQRIFGEKVLGLSQGSVSDMLSRPKPWSKLTQKGREPFIRMQLWLNGELGQGVLPVQGQQQGPVLHSVTSLQDPLQQGCVSSESTPKTSASCSPAPESPMSSSESVKSLTELVQQPCPPIEASKDSKPPEPSDPPASDSQPTTPLPLSGHSALSIQELVAMSPELDTYGITKRVKEVLTDNNLGQRLFGETILGLTQGSVSDLLARPKPWHKLSLKGREPFVRMQLWLNDPNNVEKLMDMKRMEKKAYMKRRHSSVSDSQPCEPPSVGTEYSQGASPQPQHQLKKPRVVLAPEEKEALKRAYQQKPYPSPKTIEDLATQLNLKTSTVINWFHNYRSRIRRELFIEEIQAGSQGQAGASDSPSARSGRAAPSSEGDSCDGVEATEGPGSADTEEPKSQGEAEREEVPRPAEQTEPPPSGTPGPDDARDDDHEGGPVEGPGPLPSPASATATAAPAAPEDAATSAAAAPGEGPAAPSSAPPPSNSSSSSAPRRPSSLQSLFGLPEAAGARDSRDNPLRKKKAANLNSIIHRLEKAASREEPIEWEF

SEQ ID NO: 43 - DNA, 1558 bp, Homo sapiens
agcagcagcccgacgcaagaggcaggaagcgcagcaactcgtgtctgagcgcccggcggaaaaccgaagttggaagtgtctcttagcagcgcgcggagaagaacggggagccagcatcatggcagaacaggatgtggaaaacgatcttttggattacgatgaagaggaagagccccaggctcctcaagagagcacaccagctccccctaagaaagacatcaagggatcctacgtttccatccacagctctggcttccgggactttctgctgaagccggagctcctgcgggccatcgtggactgtggctttgagcatccttctgaggtccagcatgagtgcattccccaggccatcctgggcatggacgtcctgtgccaggccaagtccgggatgggcaagacagcggtcttcgtgctggccaccctacagcagattgagcctgtcaacggacaggtgacggtcctggtcatgtgccacacgagggagctggccttccagatcagcaaggaatatgagcgcttttccaagtacatgcccagcgtcaaggtgtctgtgttcttcggtggtctctccatcaagaaggatgaagaagtgttgaagaagaactgtccccatgtcgtggtggggaccccgggccgcatcctggcgctcgtgcggaataggagcttcagcctaaagaatgtgaagcactttgtgctggacgagtgtgacaagatgctggagcagctggacatgcggcgggatgtgcaggagatcttccgcctgacaccacacgagaagcagtgcatgatgttcagcgccaccctgagcaaggacatccggcctgtgtgcaggaagttcatgcaggatcccatggaggtgtttgtggacgacgagaccaagctcacgctgcacggcctgcagcagtactacgtcaaactcaaagacagtgagaagaaccgcaagctctttgatctcttggatgtgctggagtttaaccaggtgataatcttcgtcaagtcagtgcagcgctgcatggccctggcccagctcctcgtggagcagaacttcccggccatcgccatccaccggggcatggcccaggaggagcgcctgtcacgctatcagcagttcaaggatttccagcggcggatcctggtggccaccaatctgtttggccgggggatggacatcgagcgagtcaacatcgtctttaactacgacatgcctgaggactcggacacctacctgcaccgggtggcccgggcgggtcgctttggcaccaaaggcctagccatcacttttgtgtctgacgagaatgatgccaaaatcctcaatgacgtccaggaccggtttgaagttaatgtggcagaacttccagaggaaatcgacatctccacatacatcgagcagagccggtaaccaccacgtgccagagccgcccacccggagccgcccgcatgcagcttcacctcccctttccaggcgccactgttgagaagctagagattgtatgagaataaacttgttattatggaagcctggctcccaccccatctaaaaaaaaaaaaaaaaaaa

SEQ ID NO: 44 - protein, 427 aa, Homo sapiens
MAEQDVENDLLDYDEEEEPQAPQESTPAPPKKDIKGSYVSIHSSGFRDFLLKPELLRAIVDCGFEHPSEVQHECIPQAILGMDVLCQAKSGMGKTAVFVLATLQQIEPVNGQVTVLVMCHTRELAFQISKEYERFSKYMPSVKVSVFFGGLSIKKDEEVLKKNCPHVVVGTPGRILALVRNRSFSLKNVKHFVLDECDKMLEQLDMRRDVQEIFRLTPHEKQCMMFSATLSKDIRPVCRKFMQDPMEVFVDDETKLTLHGLQQYYVKLKDSEKNRKLFDLLDVLEFNQVIIFVKSVQRCMALAQLLVEQNFPAIAIHRGMAQEERLSRYQQFKDFQRRILVATNLFGRGMDIERVNIVFNYDMPEDSDTYLHRVARAGRFGTKGLAITFVSDENDAKILNDVQDRFEVNVAELPEEIDISTYIEQSR

SEQ ID NO: 45 - DNA, 6173 bp, Homo sapiens
attttgggagcttcgagtcaacaataaaggaccgagggtgccgagcgggagtggcctcgttggtaggacacgggcccgagtcgcgaggcttgggattgacgtgagtgaattcagatataactcaagcttgttagagggctttttaaaaataaaaagttgattccgtgcaagagagcaagttactgctgcttaccgttcagagacttacaggtgcttgcctgcattgcaataaaggactcatttattgagcaagacttatatttatctcttcattttggagagcctaataaactgttattacagtttctctactgactttcaaaagttttgaagtttgaaagacctttgcaattaaaacagcatgagcacggccagaacagagaaccctgttataatgggtctgtccagtcaaaatggtcagctgagaggccctgtgaaacccactggtggccctggaggagggggcacacagacacagcaacagatgaaccagctgaaaaacaccaacacaatcaataatggcactcagcagcaagcacagagtatgaccaccactattaaacctggtgatgactggaaaaagactttaaaactccctccaaaggatctaagaatcaaaacttcggatgtgacctccacaaaaggaaatgagtttgaagattactgtttgaaacgggagttactgatgggaatttttgaaatgggctgggaaaagccatctcctattcaggaggagagcattcccattgctttatctggtagggatatcttagctagagcaaaaaatggaacaggcaagagcggtgcctacctcattcccttacttgaacggctagacctgaagaaggacaatatacaagcaatggtgattgttcccactagagaacttgctctacaggtcagtcaaatttgcatccaggtcagcaaacacatgggaggggccaaagtgatggcaaccacaggaggaaccaatttacgagatgacataatgaggcttgatgatacagtgcacgtggtgattgctacccctgggagaatcctggatcttattaagaaaggagtagcaaaggttgatcatgtccagatgatagtattggatgaggcagataagttgctgtcacaggattttgtgcagataatggaggatattattctcacgctacctaaaaacaggcagattttactatattccgctactttccctcttagtgtacagaagttcatgaattcccatttgcagaaaccctatgagattaacctgatggaggaactaactctgaagggagtaacccagtactacgcatatgtaactgagcgccaaaaagtacactgcctcaacacacttttctccaggcttcagataaaccagtcgatcattttctgtaactcctctcagcgagttgaattgctagccaagaagatttctcaactgggttattcttgcttctatattcatgctaaaatgaggcaggaacatcgaaatcgtgtatttcatgatttccgaaatggcttatgccgcaatcttgtttgcactgatctgtttacccgaggtattgatatacaagctgtgaatgtggtaataaactttgatttcccaaagctggcagagacctatctccatcgtattggaagatcaggtcgctttggtcatcttggcttagccatcaacttgatcacatatgatgatcgcttcaacctgaaaagtattgaggagcagctgggaacagaaattaaacctattccgagcaacattgataagagcctgtatgtggcagaataccacagcgagcctgtagaagatgagaaaccttaacaagcatgctttgacaaattacaaaaggctcgtttggatctgtgacacatcgttttggggggaatgctcctctctttgtgggtttttcatcttttattttggaactatgaagacttaaaagagctcagacattttctttttttaactggtgaagagaaaaaggctgaaaagaaggaatataccttttttgttccacttgtttgcactgtgtgctgactgaacattagttgcactaactgctggtttttaaaaaatgttttctggggaaaggggacaaggaaggaaaagaaagaagagaaggggagaaaccctaaaaagagaagaatcttaatgaacacacaagcttgtcaatgatttcaaaattctccaacagctgactctcgtgcatttcaacttctccctgattcctcatccgttttttaagcctgaagagcttattacttatttgtgcgaagtgccttatgctatgagaccattcagaatatcatcttttagacacagcccgaggaatcaacaatagtaactctttctttccgtttttttttctttttcttttaaaaaatgtcttcttattttggtttcaggttgaagtctcttccctttctacccagtactcgagcccagggctagaagttgaaactcactagtaatgttaaacaccattttttttttctttttggggaggagttgatatgcaactgcagttcatccgcactgtaaatacatgtatttaaaaaaacaatcccaagtaaaaatttcttctgggctgagtagataaaaaacatcatcgctcccaaaggaaagagcagtctatcattgcaggagccatatgacaagcctttgtgctctatagcagacactaaagactgggttacatatgcctccagtagtagtatggcacttgatgtgtagacatgtcagagcttggccctctttcctctgtggcaaagcgtgtcccatagaaaattgggtgtgtatacttgtataactttgtaaataagttttttttctgggttcatatatatatatatatatacatatatatatatttttttttggatgaaggttgctgggattaaggggattagagtgattatgggagcagctaaagatgagaggggctcagttttacgcaacactaaattctagaaagtactttggcctcgtgctgtagagagcagatttctatggtaccctgtgttagtaaaggggcccagaaatctgggatgtactgtttgctgccacactgtctcatctagtacctttggagtaggtttaccagagagagcaaggaagcttcaaaacattgataattcaacatttattttgagaagctctgattttgcttcttccccctttctaaaagtttgaggaatatttcaagctctgcaacagggggcaaagattaatctaccttgcagtgtaggaattctattgagtggcagtgtcattgagcagtatatatataaagcacagatttgcatttcagaatattagccagtaccagctttggtaatgttagcagttctggagcttaattttctgtggatcatttcctgtagtgtgtaaatgtgttgccctctgcccgctttgatacataaacttttgcaggaatgggcaacctgagagctgttaactttcatgctacagaaagctgcttgccattctcttgcattgtgacaagaattgttacctgtcattttgcactgtaaattgctggcagatgctttacagtcaatagtgttgctttaaattgtgcccctcccaacatgcttgatgtttggcctgatctccaggcaaaaggagtgagatgaatcaaaaccagtgaacttttttttttaatgtttttaattcccttttaacccagtgtactaggtcaatcaggaggcatctggaaagggggggaaaaaagcaaaaaacaaaattaaaaaaaattgatttccatattttatttttcaaaaccctaaaatattacaaaataagtcccgcatatactttaatgttttaactcttttggacaaaggaatcaattacttgaagttgcttttttgactctgcctacttctgagcaaactatttgcgactcacccacaattgccttggagatcaaaatcctacagatgcctcctgatgggacatagccctaactccttaacaactgtagcaagaactgcacggtacaaacccaaaaaagaacaagctcatctatttggaacccaagcctcatattttctgtccagtcaatgttggttactaaatagaaaacctaattaaggaagtaacttttttccagggaggggtgggagagggaatttaaaaggtgtcaacttttgaccaaaaaaattgtgcccttgtaccgatgcagctctctttctcccccacctcttgcgagataagagggatcattcatgtagaagaaaagagtataaatgcaattctgtatctcgctagagaacgtgtgggtgactaaacaaaaagtgcagtctccttcaccaactttagactgcgtggtgccacatgcctgtgggtccctcttaaagcacagacttaaaatggaaagtattactgaagtatagcctctaatgaggagtggcacttaaactatctgggacaccactactggacacggtcttgtagaggcagctgtccagttttggtgcttgactcttgaataggaattgttaaatggaaagatgctctgaggactaggtcaaagcctggtctttttttttttttttttttttttctttcttttttgggccctcataataagcattgttactattggaagttgttttcacattctttccaatattaaatatgtatttttttaagtaatgataatattttccagtggctcatttggatgagaactaccctctatttttaatattaaaactacatccaactcatcatttagcctttggttgtacagttgtgtaatgggctatggactgttacacaccttaccacctctaggcctatgttttttctttccccatatattctgatggggataaatactgttttgcctctcccataggaatggaatacatttattctaaaatgatctttcacagaagtaagagagagggaaacctaaatatacctctaaattgtttgaagttggtcccagcagcataaaatgggttggccccaaagggttggagggtgggcttggttatcagtatttgttttcagaatgagatgggagcatctttcctttgccacgtgctttgtgcttgataacatcatgcttggttcaaacgacaactcagcacaaagccttgagtataaattgttggaatcaaaacatctcattctgatgacgtggtttaattttttaatttttttttttaataggggtgggagggagggtactttgccccagaagggagggtgtctgcactaaggatttagaaacactttggaagctcataacctcatcagaaactgcctttagccacactcctgaccttctagatgagtaacaaaaaaatgaaataagttcttggaaattaagccatttattttaatttgctatttttttcaatgttctaggtatctttaaatttgttattgtggaatcattttcctgccagatacctttatcaaaattattggcctcatgagagctgaagtaagtcagctttttggtgaactttagtggacttctgtgagattgtagttgtactttgtatctctaaatctaaagatagttttttaaaactcccaaagaaaatctgctctcctttctgatctaaaaactcatctttggggtaaagagttaagtgtccaaaggttgtcacagttcatgaggtcagagggagctagcctggcacctggactctgcccatccacagctgacagattccaacagaagtgtatttaaattctccagtagacaatgctgggtaagggagggggtagggctgggttattaagatacaggctgctgtattttacattggttgtgtgggaaggggagcctggagaaaacaaagtcactattcccttttttgaaacaggaaaaaaaattattttttgttcagtaaaaatggtagagaattccaatgtccctagccacaagggaccagttccactgagaagtgaacagtgggaactcaaaatttcagaaacattgggggaagggaaaattggctttctcttaattggcagatgttccagtggggggggggggggctctgtttttgttgggatgtgttatgttgtatgtacgcatatatggaccggagtctgctgagtttataaggttccaaaaatatggtaaaatcttggtttttgttaatttatctcaataaaagcccactggaactccaaaaaaaaaaaaaaaaaaaaa

SEQ ID NO: 46 - protein, 483 aa, Homo sapiens
MSTARTENPVIMGLSSQNGQLRGPVKPTGGPGGGGTQTQQQMNQLKNTNTINNGTQQQAQSMTTTIKPGDDWKKTLKLPPKDLRIKTSDVTSTKGNEFEDYCLKRELLMGIFEMGWEKPSPIQEESIPIALSGRDILARAKNGTGKSGAYLIPLLERLDLKKDNIQAMVIVPTRELALQVSQICIQVSKHMGGAKVMATTGGTNLRDDIMRLDDTVHVVIATPGRILDLIKKGVAKVDHVQMIVLDEADKLLSQDFVQIMEDIILTLPKNRQILLYSATFPLSVQKFMNSHLQKPYEINLMEELTLKGVTQYYAYVTERQKVHCLNTLFSRLQINQSIIFCNSSQRVELLAKKISQLGYSCFYIHAKMRQEHRNRVFHDFRNGLCRNLVCTDLFTRGIDIQAVNVVINFDFPKLAETYLHRIGRSGRFGHLGLAINLITYDDRFNLKSIEEQLGTEIKPIPSNIDKSLYVAEYHSEPVEDEKP

SEQ ID NO: 47 - DNA, 6246 bp, Homo sapiens
atcttgagtggaggaggagccgcggtcgccgccatgcggagaggcagggaaagagggaggaggcggcgggcgggcgaacgggcgagcgagggagggggcagaggagccgagttagctcagccaggcggcgacttcggcggcgccacgagagcgggcagcggaggagattgacgtgagtgaattcagatataactcaagcttgttagagggctttttaaaaataaaaagttgattccgtgcaagagagcaagttactgctgcttaccgttcagagacttacaggtgcttgcctgcattgcaataaaggactcatttattgagcaagacttatatttatctcttcattttggagagcctaataaactgttattacagtttctctactgactttcaaaagttttgaagtttgaaagacctttgcaattaaaacagcatgagcacggccagaacagagaaccctgttataatgggtctgtccagtcaaaatggtcagctgagaggccctgtgaaacccactggtggccctggaggagggggcacacagacacagcaacagatgaaccagctgaaaaacaccaacacaatcaataatggcactcagcagcaagcacagagtatgaccaccactattaaacctggtgatgactggaaaaagactttaaaactccctccaaaggatctaagaatcaaaacttcggatgtgacctccacaaaaggaaatgagtttgaagattactgtttgaaacgggagttactgatgggaatttttgaaatgggctgggaaaagccatctcctattcaggaggagagcattcccattgctttatctggtagggatatcttagctagagcaaaaaatggaacaggcaagagcggtgcctacctcattcccttacttgaacggctagacctgaagaaggacaatatacaagcaatggtgattgttcccactagagaacttgctctacaggtcagtcaaatttgcatccaggtcagcaaacacatgggaggggccaaagtgatggcaaccacaggaggaaccaatttacgagatgacataatgaggcttgatgatacagtgcacgtggtgattgctacccctgggagaatcctggatcttattaagaaaggagtagcaaaggttgatcatgtccagatgatagtattggatgaggcagataagttgctgtcacaggattttgtgcagataatggaggatattattctcacgctacctaaaaacaggcagattttactatattccgctactttccctcttagtgtacagaagttcatgaattcccatttgcagaaaccctatgagattaacctgatggaggaactaactctgaagggagtaacccagtactacgcatatgtaactgagcgccaaaaagtacactgcctcaacacacttttctccaggcttcagataaaccagtcgatcattttctgtaactcctctcagcgagttgaattgctagccaagaagatttctcaactgggttattcttgcttctatattcatgctaaaatgaggcaggaacatcgaaatcgtgtatttcatgatttccgaaatggcttatgccgcaatcttgtttgcactgatctgtttacccgaggtattgatatacaagctgtgaatgtggtaataaactttgatttcccaaagctggcagagacctatctccatcgtattggaagatcaggtcgctttggtcatcttggcttagccatcaacttgatcacatatgatgatcgcttcaacctgaaaagtattgaggagcagctgggaacagaaattaaacctattccgagcaacattgataagagcctgtatgtggcagaataccacagcgagcctgtagaagatgagaaaccttaacaagcatgctttgacaaattacaaaaggctcgtttggatctgtgacacatcgttttggggggaatgctcctctctttgtgggtttttcatcttttattttggaactatgaagacttaaaagagctcagacattttctttttttaactggtgaagagaaaaaggctgaaaagaaggaatataccttttttgttccacttgtttgcactgtgtgctgactgaacattagttgcactaactgctggtttttaaaaaatgttttctggggaaaggggacaaggaaggaaaagaaagaagagaaggggagaaaccctaaaaagagaagaatcttaatgaacacacaagcttgtcaatgatttcaaaattctccaacagctgactctcgtgcatttcaacttctccctgattcctcatccgttttttaagcctgaagagcttattacttatttgtgcgaagtgccttatgctatgagaccattcagaatatcatcttttagacacagcccgaggaatcaacaatagtaactctttctttccgtttttttttctttttcttttaaaaaatgtcttcttattttggtttcaggttgaagtctcttccctttctacccagtactcgagcccagggctagaagttgaaactcactagtaatgttaaacaccattttttttttctttttggggaggagttgatatgcaactgcagttcatccgcactgtaaatacatgtatttaaaaaaacaatcccaagtaaaaatttcttctgggctgagtagataaaaaacatcatcgctcccaaaggaaagagcagtctatcattgcaggagccatatgacaagcctttgtgctctatagcagacactaaagactgggttacatatgcctccagtagtagtatggcacttgatgtgtagacatgtcagagcttggccctctttcctctgtggcaaagcgtgtcccatagaaaattgggtgtgtatacttgtataactttgtaaataagttttttttctgggttcatatatatatatatatatacatatatatatatttttttttggatgaaggttgctgggattaaggggattagagtgattatgggagcagctaaagatgagaggggctcagttttacgcaacactaaattctagaaagtactttggcctcgtgctgtagagagcagatttctatggtaccctgtgttagtaaaggggcccagaaatctgggatgtactgtttgctgccacactgtctcatctagtacctttggagtaggtttaccagagagagcaaggaagcttcaaaacattgataattcaacatttattttgagaagctctgattttgcttcttccccctttctaaaagtttgaggaatatttcaagctctgcaacagggggcaaagattaatctaccttgcagtgtaggaattctattgagtggcagtgtcattgagcagtatatatataaagcacagatttgcatttcagaatattagccagtaccagctttggtaatgttagcagttctggagcttaattttctgtggatcatttcctgtagtgtgtaaatgtgttgccctctgcccgctttgatacataaacttttgcaggaatgggcaacctgagagctgttaactttcatgctacagaaagctgcttgccattctcttgcattgtgacaagaattgttacctgtcattttgcactgtaaattgctggcagatgctttacagtcaatagtgttgctttaaattgtgcccctcccaacatgcttgatgtttggcctgatctccaggcaaaaggagtgagatgaatcaaaaccagtgaacttttttttttaatgtttttaattcccttttaacccagtgtactaggtcaatcaggaggcatctggaaagggggggaaaaaagcaaaaaacaaaattaaaaaaaattgatttccatattttatttttcaaaaccctaaaatattacaaaataagtcccgcatatactttaatgttttaactcttttggacaaaggaatcaattacttgaagttgcttttttgactctgcctacttctgagcaaactatttgcgactcacccacaattgccttggagatcaaaatcctacagatgcctcctgatgggacatagccctaactccttaacaactgtagcaagaactgcacggtacaaacccaaaaaagaacaagctcatctatttggaacccaagcctcatattttctgtccagtcaatgttggttactaaatagaaaacctaattaaggaagtaacttttttccagggaggggtgggagagggaatttaaaaggtgtcaacttttgaccaaaaaaattgtgcccttgtaccgatgcagctctctttctcccccacctcttgcgagataagagggatcattcatgtagaagaaaagagtataaatgcaattctgtatctcgctagagaacgtgtgggtgactaaacaaaaagtgcagtctccttcaccaactttagactgcgtggtgccacatgcctgtgggtccctcttaaagcacagacttaaaatggaaagtattactgaagtatagcctctaatgaggagtggcacttaaactatctgggacaccactactggacacggtcttgtagaggcagctgtccagttttggtgcttgactcttgaataggaattgttaaatggaaagatgctctgaggactaggtcaaagcctggtctttttttttttttttttttttttctttcttttttgggccctcataataagcattgttactattggaagttgttttcacattctttccaatattaaatatgtatttttttaagtaatgataatattttccagtggctcatttggatgagaactaccctctatttttaatattaaaactacatccaactcatcatttagcctttggttgtacagttgtgtaatgggctatggactgttacacaccttaccacctctaggcctatgttttttctttccccatatattctgatggggataaatactgttttgcctctcccataggaatggaatacatttattctaaaatgatctttcacagaagtaagagagagggaaacctaaatatacctctaaattgtttgaagttggtcccagcagcataaaatgggttggccccaaagggttggagggtgggcttggttatcagtatttgttttcagaatgagatgggagcatctttcctttgccacgtgctttgtgcttgataacatcatgcttggttcaaacgacaactcagcacaaagccttgagtataaattgttggaatcaaaacatctcattctgatgacgtggtttaattttttaatttttttttttaataggggtgggagggagggtactttgccccagaagggagggtgtctgcactaaggatttagaaacactttggaagctcataacctcatcagaaactgcctttagccacactcctgaccttctagatgagtaacaaaaaaatgaaataagttcttggaaattaagccatttattttaatttgctatttttttcaatgttctaggtatctttaaatttgttattgtggaatcattttcctgccagatacctttatcaaaattattggcctcatgagagctgaagtaagtcagctttttggtgaactttagtggacttctgtgagattgtagttgtactttgtatctctaaatctaaagatagttttttaaaactcccaaagaaaatctgctctcctttctgatctaaaaactcatctttggggtaaagagttaagtgtccaaaggttgtcacagttcatgaggtcagagggagctagcctggcacctggactctgcccatccacagctgacagattccaacagaagtgtatttaaattctccagtagacaatgctgggtaagggagggggtagggctgggttattaagatacaggctgctgtattttacattggttgtgtgggaaggggagcctggagaaaacaaagtcactattcccttttttgaaacaggaaaaaaaattattttttgttcagtaaaaatggtagagaattccaatgtccctagccacaagggaccagttccactgagaagtgaacagtgggaactcaaaatttcagaaacattgggggaagggaaaattggctttctcttaattggcagatgttccagtggggggggggggggctctgtttttgttgggatgtgttatgttgtatgtacgcatatatggaccggagtctgctgagtttataaggttccaaaaatatggtaaaatcttggtttttgttaatttatctcaataaaagcccactggaactccaaaaaaaaaaaaaaaaaaaaaa

SEQ ID NO: 48 - protein, 483 aa, Homo sapiens; identical to SEQ ID NO: 46

SEQ ID NO: 49 - DNA, 2265 bp, Homo sapiens
acgcggaggttgtaattggtctctagaccacacctagttgttgagtgccgctgcttgaaaatctcagttctgccgagatcgcagaatacacacaagctacctttgggcaccagagcagacagaaccgcggagcttcagggtggaagattcgtggaaactttgccaaggccaggacctcgtgtgttcccgtccgcccctctgggacggcgccagcccggcaggccgccgaccgtcctggggctcccgcgcagcgcgatgccggcctcgtccaccgtccacgtgctgcagctgctgcgggagctgctcgccttcgtgctcctcagctacacggtgctcatcggggcgctgctgctggccggctggaccacttacttcctggtgctgaagtgacagcgccgtcgccgcgcccggccccgcctcccgcccggccccgcctcccgcccggccccgcctccctaactcaccaggaaattcccttcaagccctggcccgaactgagtccccgcccacccgccagcgtcacggcgcccgactcagctccgcgccggacccacctccgcgccctcaggccctgcatatgccccgccccgcgcggaagttccggcggttggttgccttgcgcggccgttacagcctttgccctaagcctcgccccctttccccctgcctgcccaatcccgactgcttccttgggtgggggcgtggctatggggcgaggcgctctcaggtggaggccgtgccccgctccgcgctcacgaagctgcgtcacttccggcgtgtgcgtctggcgtccgcgcgctgcacaatggcggctctgaagagttggctgtcgcgcagcgtaacttcattcttcaggtacagacagtgtttgtgtgttcctgttgtggctaactttaagaagcggtgtttctcagaattgataagaccatggcacaaaactgtgacgattggctttggagtaaccctgtgtgcggttcctattgcacagaaatcagagcctcattcccttagtagtgaagcattgatgaggagagcagtgtctttggtaacagatagcacctctacctttctctctcagaccacatatgcgttgattgaagctattactgaatatactaaggctgtttataccttaacttctctttaccgacaatatacaagtttacttgggaaaatgaattcagaggaggaagatgaagtgtggcaggtgatcataggagccagagctgagatgacttcaaaacaccaagagtacttgaagctggaaaccacttggatgactgcagttggtctttcagagatggcagcagaagctgcatatcaaactggcgcagatcaggcctctataaccgccaggaatcacattcagctggtgaaactgcaggtggaagaggtgcaccagctctcccggaaagcagaaaccaagctggcagaagcacagatagaagagctccgtcagaaaacacaggaggaaggggaggagcgggctgagtcggagcaggaggcctacctgcgtgaggattgagggcctgagcacactgccctgtctccccactcagtggggaaagcaggggcagatgccaccctgcccagggttggcatgactgtctgtgcaccgagaagaggcggcagatcctgccctggccaatcaggcgagacgcctttgtgagctgtgagtgcctcctgtggtctcaggcttgcgctggacctggttcttagcccttgggcactgcaccctgtttaacatttcaccccactctgtacagctgctcttacccattttttttacctcacacccaaagcattttgcctacctgggtcagagagaggagtcctttttgtcatgcccttaagttcagcaactgtttaacctgttttcagtcttatttacgtcgtcaaaaatgatttagtacttgttccctctgttgggatgccagttgtggcagggggaggggaacctgtccagtttgtacgatttctttgtatgtatttctgatgtgttctctgatctgcccccactgtcctgtgaggacagctgaggccaaggagtgaaaaacctattactactaagagaaggggtgcagagtgtttacctggtgctctcaacaggacttaacatcaacaggacttaacacaggcctcttgttccttcctttctttccgtttctctattgtatccaaaggagaagagtgtaagattttgtttgcatctgaaagagaaaatgcgtctctcctggggtcctaaaaaaaaaaaaaaaaaaaaaa

SEQ ID NO: 50 - protein, 239 aa, Homo sapiens
MAALKSWLSRSVTSFFRYRQCLCVPVVANFKKRCFSELIRPWHKTVTIGFGVTLCAVPIAQKSEPHSLSSEALMRRAVSLVTDSTSTFLSQTTYALIEAITEYTKAVYTLTSLYRQYTSLLGKMNSEEEDEVWQVIIGARAEMTSKHQEYLKLETTWMTAVGLSEMAAEAAYQTGADQASITARNHIQLVKLQVEEVHQLSRKAETKLAEAQIEELRQKTQEEGEERAESEQEAYLRED

SEQ ID NO: 51 - DNA, 2133 bp, Homo sapiens
acgcggaggttgtaattggtctctagaccacacctagttgttgagtgccgctgcttgaaaatctcagttctgccgagatcgcagaatacacacaagctacctttgggcaccagagcagacagaaccgcggagcttcagggtggaagattcgtggaaactttgccaaggccaggacctcgtgtgttcccgtccgcccctctgggacggcgccagcccggcaggccgccgaccgtcctggggctcccgcgcagcgcgatgccggcctcgtccaccgtccacgtgctgcagctgctgcgggagctgctcgccttcgtgctcctcagctacacggtgctcatcggggcgctgctgctggccggctggaccacttacttcctggtgctgaagtgacagcgccgtcgccgcgcccggccccgcctcccgcccggccccgcctcccgcccggccccgcctccctaactcaccaggaaattcccttcaagccctggcccgaactgagtccccgcccacccgccagcgtcacggcgcccgactcagctccgcgccggacccacctccgcgccctcaggccctgcatatgccccgccccgcgcggaagttccggcggttggttgccttgcgcggccgttacagcctttgccctaagcctcgccccctttccccctgcctgcccaatcccgactgcttccttgggtgggggcgtggctatggggcgaggcgctctcaggtggaggccgtgccccgctccgcgctcacgaagctgcgtcacttccggcgtgtgcgtctggcgtccgcgcgctgcacaatggcggctctgaagagttggctgtcgcgcagcgtaacttcattcttcaggtacagacagtgtttgtgtgttcctgttgtggctaactttaagaagcggtgtttctcagaattgataagaccatggcacaaaactgtgacgattggctttggagtaaccctgtgtgcggttcctattgcacaggctgtttataccttaacttctctttaccgacaatatacaagtttacttgggaaaatgaattcagaggaggaagatgaagtgtggcaggtgatcataggagccagagctgagatgacttcaaaacaccaagagtacttgaagctggaaaccacttggatgactgcagttggtctttcagagatggcagcagaagctgcatatcaaactggcgcagatcaggcctctataaccgccaggaatcacattcagctggtgaaactgcaggtggaagaggtgcaccagctctcccggaaagcagaaaccaagctggcagaagcacagatagaagagctccgtcagaaaacacaggaggaaggggaggagcgggctgagtcggagcaggaggcctacctgcgtgaggattgagggcctgagcacactgccctgtctccccactcagtggggaaagcaggggcagatgccaccctgcccagggttggcatgactgtctgtgcaccgagaagaggcggcagatcctgccctggccaatcaggcgagacgcctttgtgagctgtgagtgcctcctgtggtctcaggcttgcgctggacctggttcttagcccttgggcactgcaccctgtttaacatttcaccccactctgtacagctgctcttacccattttttttacctcacacccaaagcattttgcctacctgggtcagagagaggagtcctttttgtcatgcccttaagttcagcaactgtttaacctgttttcagtcttatttacgtcgtcaaaaatgatttagtacttgttccctctgttgggatgccagttgtggcagggggaggggaacctgtccagtttgtacgatttctttgtatgtatttctgatgtgttctctgatctgcccccactgtcctgtgaggacagctgaggccaaggagtgaaaaacctattactactaagagaaggggtgcagagtgtttacctggtgctctcaacaggacttaacatcaacaggacttaacacaggcctcttgttccttcctttctttccgtttctctattgtatccaaaggagaagagtgtaagattttgtttgcatctgaaagagaaaatgcgtctctcctggggtcctaaaaaaaaaaaaaaaaaaaaaa

SEQ ID NO: 52 - protein, 195 aa, Homo sapiens
MAALKSWLSRSVTSFFRYRQCLCVPVVANFKKRCFSELIRPWHKTVTIGFGVTLCAVPIAQAVYTLTSLYRQYTSLLGKMNSEEEDEVWQVIIGARAEMTSKHQEYLKLETTWMTAVGLSEMAAEAAYQTGADQASITARNHIQLVKLQVEEVHQLSRKAETKLAEAQIEELRQKTQEEGEERAESEQEAYLRED

SEQ ID NO: 53 - DNA, 3084 bp, Homo sapiens
tagccgtcgcggcgcgcggtgcggcctgggagagtcggaagcgcggcggccgcggagccctgcgagtaggcagcgttgggcccatgcaggacgcggagaacgtggcggtgcccgaggcggccgaggagcgcgccgagcccggccagcagcagccggccgccgagccgccgccagccgaggggctgctgcggcccgcggggcccggcgctccggaggccgcggggaccgaggcctccagtgaggaggtggggatcgcggaggccgggccggagtccgaggtgaggaccgagccggcggccgaggcagaggcggcctccggcccgtccgagtcgccctcgccgccggccgccgaggagctgcccgggtcgcatgctgagccccctgtcccggcacagggcgaggccccaggagagcaggctcgggacgagcgctccgacagccgggcccaggcggtgtccgaggacgcgggaggaaacgagggcagagcggccgaggccgaaccccgggcgctggagaacggcgacgcggacgagccctccttcagcgaccccgaggacttcgtggacgacgtgagcgaggaagaattactgggagatgtactcaaagatcggccccaggaagcagatggaatcgattcggtgattgtagtggacaatgtccctcaggtgggacccgaccgacttgagaaactcaaaaatgtcatccacaagatcttttccaagtttgggaaaatcacaaatgatttttatcctgaagaggatgggaagacaaaagggtatattttcctggagtacgcgtcccctgcccacgctgtggatgctgtgaagaacgccgacggctacaagcttgacaagcagcacacattccgggtcaacctctttacggattttgacaagtatatgacgatcagtgacgagtgggatattccagagaaacagcctttcaaagacctggggaacttacgttactggcttgaagaggcagaatgcagagatcagtacagtgtgatttttgagagtggagaccgcacttccatattctggaatgacgtaaaagaccctgtctcaattgaagaaagagcgagatggacagagacgtatgtgcgttggtctcctaagggcacctacctggctacctttcatcaaagaggcattgctctatgggggggagagaaattcaagcaaattcagagattcagccaccaaggggttcagcttattgacttctcaccttgtgaaaggtacctggtgacctttagccccctgatggacacgcaggatgaccctcaggccataatcatctgggacatccttacggggcacaagaagaggggttttcactgtgagagctcagcccattggcctatttttaagtggagccatgatggcaaattctttgccagaatgaccctggatacgcttagcatctatgaaactccttctatgggtcttttggacaagaagagtttgaagatctctgggataaaagacttttcttggtctcctggtggtaacataatcgccttctgggtgcctgaagacaaagatattccagccagggtaaccctgatgcagctccctaccaggcaagagatccgagtgaggaacctgttcaatgtggtggactgcaagctccattggcagaagaacggagactacttgtgtgtgaaagtagataggactccgaaaggcacccagggtgttgtcacaaattttgaaattttccgaatgagggagaaacaggtacctgtggatgtggtcgagatgaaagaaaccatcatagcctttgcctgggaaccaaatggaagtaagtttgctgtgctgcacggagaggctccgcggatatctgtgtctttctaccacgtcaaaaacaacgggaagattgaactcatcaagatgttcgacaagcagcaggcgaacaccatcttctggagcccccaaggacagttcgtggtgttggcgggcctgaggagtatgaacggtgccttagcgtttgtggacacttcggactgcacggtcatgaacatcgcagagcactacatggcttccgacgtcgaatgggatcctactgggcgctacgtcgtcacctctgtgtcctggtggagccataaggtggacaacgcgtactggctgtggactttccagggacgcctcctgcagaagaacaacaaggaccgcttctgccagctgctgtggcggccccggcctcccacactcctgagccaggaacagatcaagcaaattaaaaaggatctgaagaaatactctaagatctttgaacagaaggatcgtttgagtcagtccaaagcctcaaaggaattggtggagagaaggcgcaccatgatggaagatttccggaagtaccggaaaatggcccaggagctctatatggagcagaaaaacgagcgcctggagttgcgaggaggggtggacactgacgagctggacagcaacgtggacgactgggaagaggagaccattgagttcttcgtcactgaagaaatcattcccctcgggaatcaggagtgacctggagcactgtggggacggactccgcctgctgttcccgcgctgagctacaggactcccgagtgtgagccgcggttcctctgttgcagcgcagccgtgtgtgctgtggagccgaggccgtcctgcaggaagccgcgtgactcccgcctcctccctgtgctctctggctctggactgtgactgcgcctggattctgccattgcgacacatttttgtgcctttcagcccctggtgtctgcagtgggggatttaaggcacccgcttccacttctttcttgtttggagttttctgttggaaccgccggcgttggctccgaagacttagcgacgccactggcggcaccttctcctgcgcccagtgatgtttccacggtgcctgtacacagccgagcagcatttccgttgaaggacttgcatccccattgcgggcagtgctggacgtgtcccggagacccaccgggagggcgccgccatgccttgtacccccaccgtgcaggttgtggccggttttctccgcaggttgaacatggaaataaaagcaaacttgtatgaaaaa

SEQ ID NO: 54 - protein, 814 aa, Homo sapiens
MQDAENVAVPEAAEERAEPGQQQPAAEPPPAEGLLRPAGPGAPEAAGTEASSEEVGIAEAGPESEVRTEPAAEAEAASGPSESPSPPAAEELPGSHAEPPVPAQGEAPGEQARDERSDSRAQAVSEDAGGNEGRAAEAEPRALENGDADEPSFSDPEDFVDDVSEEELLGDVLKDRPQEADGIDSVIVVDNVPQVGPDRLEKLKNVIHKIFSKFGKITNDFYPEEDGKTKGYIFLEYASPAHAVDAVKNADGYKLDKQHTFRVNLFTDFDKYMTISDEWDIPEKQPFKDLGNLRYWLEEAECRDQYSVIFESGDRTSIFWNDVKDPVSIEERARWTETYVRWSPKGTYLATFHQRGIALWGGEKFKQIQRFSHQGVQLIDFSPCERYLVTFSPLMDTQDDPQAIIIWDILTGHKKRGFHCESSAHWPIFKWSHDGKFFARMTLDTLSIYETPSMGLLDKKSLKISGIKDFSWSPGGNIIAFWVPEDKDIPARVTLMQLPTRQEIRVRNLFNVVDCKLHWQKNGDYLCVKVDRTPKGTQGVVTNFEIFRMREKQVPVDVVEMKETIIAFAWEPNGSKFAVLHGEAPRISVSFYHVKNNGKIELIKMFDKQQANTIFWSPQGQFVVLAGLRSMNGALAFVDTSDCTVMNIAEHYMASDVEWDPTGRYVVTSVSWWSHKVDNAYWLWTFQGRLLQKNNKDRFCQLLWRPRPPTLLSQEQIKQIKKDLKKYSKIFEQKDRLSQSKASKELVERRRTMMEDFRKYRKMAQELYMEQKNERLELRGGVDTDELDSNVDDWEEETIEFFVTEEIIPLGNQE

SEQ ID NO: 55 - DNA, 3009 bp, Homo sapiens
tagccgtcgcggcgcgcggtgcggcctgggagagtcggaagcgcggcggccgcggagccctgcgagtaggcagcgttgggcccatgcaggacgcggagaacgtggcggtgcccgaggcggccgaggagcgcgccgagcccggccagcagcagccggccgccgagccgccgccagccgaggggctgctgcggcccgcggggcccggcgctccggaggccgcggggaccgaggcctccagtgaggaggtggggatcgcggaggccgggccggagtccgaggtgaggaccgagccggcggccgaggcagaggcggcctccggcccgtccgagtcgccctcgccgccggccgccgaggagctgcccgggtcgcatgctgagccccctgtcccggcacagggcgaggccccaggagagcaggctcgggacgagcgctccgacagccgggcccaggcggtgtccgaggacgcgggaggaaacgagggcagagcggccgaggccgaaccccgggcgctggagaacggcgacgcggacgagccctccttcagcgaccccgaggacttcgtggacgacgtgagcgaggaagaattactgggagatgtactcaaagatcggccccaggaagcagatggaatcgattcggtgattgtagtggacaatgtccctcaggtgggacccgaccgacttgagaaactcaaaaatgtcatccacaagatcttttccaagtttgggaaaatcacaaatgatttttatcctgaagaggatgggaagacaaaagggtatattttcctggagtacgcgtcccctgcccacgctgtggatgctgtgaagaacgccgacggctacaagcttgacaagcagcacacattccgggtcaacctctttacggattttgacaagtatatgacgatcagtgacgagtgggatattccagagaaacagcctttcaaagacctggggaacttacgttactggcttgaagaggcagaatgcagagatcagtacagtgtgatttttgagagtggagaccgcacttccatattctggaatgacgtaaaagaccctgtctcaattgaagaaagagcgagatggacagagacgtatgtgcgttggtctcctaagggcacctacctggctacctttcatcaaagaggcattgctctatgggggggagagaaattcaagcaaattcagagattcagccaccaaggggttcagcttattgacttctcaccttgtgaaaggtacctggtgacctttagccccctgatggacacgcaggatgaccctcaggccataatcatctgggacatccttacggggcacaagaagaggggttttcactgtgagagctcagcccattggcctatttttaagtggagccatgatggcaaattctttgccagaatgaccctggatacgcttagcatctatgaaactccttctatgggtcttttggacaagaagagtttgaagatctctgggataaaagacttttcttggtctcctggtggtaacataatcgccttctgggtgcctgaagacaaagatattccagccagggtaaccctgatgcagctccctaccaggcaagagatccgagtgaggaacctgttcaatgtggtggactgcaagctccattggcagaagaacggagactacttgtgtgtgaaagtagataggactccgaaaggcacccagggtgttgtcacaaattttgaaattttccgaatgagggagaaacaggtacctgtggatgtggtcgagatgaaagaaaccatcatagcctttgcctgggaaccaaatggaagtaagtttgctgtgctgcacggagaggctccgcggatatctgtgtctttctaccacgtcaaaaacaacgggaagattgaactcatcaagatgttcgacaagcagcaggcgaacaccatcttctggagcccccaaggacagttcgtggtgttggcgggcctgaggagtatgaacggtgccttagcgtttgtggacacttcggactgcacggtcatgaacatcgcagagcactacatggcttccgacgtcgaatgggatcctactgggcgctacgtcgtcacctctgtgtcctggtggagccataaggtggacaacgcgtactggctgtggactttccagggacgcctcctgcagaagaacaacaaggaccgcttctgccagctgctgtggcggccccggcctcccacactcctgagccaggaacagatcaagcaaattaaaaaggatctgaagaaatactctaagatctttgaacagaaggatcgtttgagtcagtccaaagcctcaaaggaattggtggagagaaggcgcaccatgatggaagatttccggaagtaccggaaaatggcccaggagctctatatggagcagaaaaacgagcgcctggagttgcgaggaggggtggacactgacgagctggacagcaacgtggacgactgggaagaggagaccattgagttcttcgtcactgaagaaatcattcccctcgggaatcaggagtgacctggagcactgtgcgcagccgtgtgtgctgtggagccgaggccgtcctgcaggaagccgcgtgactcccgcctcctccctgtgctctctggctctggactgtgactgcgcctggattctgccattgcgacacatttttgtgcctttcagcccctggtgtctgcagtgggggatttaaggcacccgcttccacttctttcttgtttggagttttctgttggaaccgccggcgttggctccgaagacttagcgacgccactggcggcaccttctcctgcgcccagtgatgtttccacggtgcctgtacacagccgagcagcatttccgttgaaggacttgcatccccattgcgggcagtgctggacgtgtcccggagacccaccgggagggcgccgccatgccttgtacccccaccgtgcaggttgtggccggttttctccgcaggttgaacatggaaataaaagcaaacttgtatgaaaaa

SEQ ID NO: 56 - protein, 814 aa, Homo sapiens; identical to SEQ ID NO: 54

SEQ ID NO: 57 - DNA, 1127 bp, Homo sapiens
gtctcgttttcgcccgcttccgctctctggccgggcttgggctgcgtggagaatactttttgcgatgcctactggagactttgattcgaagcccagttgggccgaccaggtggaggaggagggggaggacgacaaatgtgtcaccagcgagctcctcaaggggatccctctggccacaggtgacaccagcccagagccagagctactgccgggagctccactgccgcctcccaaggaggtcatcaacggaaacataaagacagtgacagagtacaagatagatgaggatggcaagaagttcaagattgtccgcaccttcaggattgagacccggaaggcttcaaaggctgtcgcaaggaggaagaactggaagaagttcgggaactcagagtttgacccccccggacccaatgtggccaccaccactgtcagtgacgatgtctctatgacgttcatcaccagcaaagaggacctgaactgccaggaggaggaggaccctatgaacaaactcaagggccagaagatcgtgtcctgccgcatctgcaagggcgaccactggaccacccgctgcccctacaaggatacgctggggcccatgcagaaggagctggccgagcagctgggcctgtctactggcgagaaggagaagctgccgggagagctagagccggtgcaggccacgcagaacaagacagggaagtatgtgccgccgagcctgcgcgacggggccagccgccgcggggagtccatgcagcccaaccgcagagccgacgacaacgccaccatccgtgtcaccaacttgtcagaggacacgcgtgagaccgacctgcaggagctcttccggcctttcggctccatctcccgcatctacctggctaaggacaagaccactggccaatccaagggctttgccttcatcagcttccaccgccgcgaggatgctgcgcgtgccattgccggggtgtccggctttggctacgaccacctcatcctcaacgtcgagtgggccaagccgtccaccaactaagccagctgccactgtgtactcggtccgggacccttggcgacagaagacagcctccgagagcgcgggctccaagggcaataaagcagctccactctctcta

SEQ ID NO: 58 - protein, 320 aa, Homo sapiens
MPTGDFDSKPSWADQVEEEGEDDKCVTSELLKGIPLATGDTSPEPELLPGAPLPPPKEVINGNIKTVTEYKIDEDGKKFKIVRTFRIETRKASKAVARRKNWKKFGNSEFDPPGPNVATTTVSDDVSMTFITSKEDLNCQEEEDPMNKLKGQKIVSCRICKGDHWTTRCPYKDTLGPMQKELAEQLGLSTGEKEKLPGELEPVQATQNKTGKYVPPSLRDGASRRGESMQPNRRADDNATIRVTNLSEDTRETDLQELFRPFGSISRIYLAKDKTTGQSKGFAFISFHRREDAARAIAGVSGFGYDHLILNVEWAKPSTN

SEQ ID NO: 59 - DNA, 2091 bp, Homo sapiens
gctgaacttccggcctcaggacgcaggcgcgggccgctcatttcgctctttccggcggtgctcgcaagcgaggcagccatgtcttatcccgctgatgattatgagtctgaggcggcttatgacccctacgcttatcccagcgactatgatatgcacacaggagatccaaagcaggaccttgcttatgaacgtcagtatgaacagcaaacctatcaggtgatccctgaggtgatcaaaaacttcatccagtatttccacaaaactgtctcagatttgattgaccagaaagtgtatgagctacaggccagtcgtgtctccagtgatgtcattgaccagaaggtgtatgagatccaggacatctatgagaacagctggaccaagctgactgaaagattcttcaagaatacaccttggcccgaggctgaagccattgctccacaggttggcaatgatgctgtcttcctgattttatacaaagaattatactacaggcacatatatgccaaagtcagtgggggaccttccttggagcagaggtttgaatcctattacaactactgcaatctcttcaactacattcttaatgccgatggtcctgctccccttgaactacccaaccagtggctctgggatattatcgatgagttcatctaccagtttcagtcattcagtcagtaccgctgtaagactgccaagaagtcagaggaggagattgactttcttcgttccaatcccaaaatctggaatgttcatagtgtcctcaatgtccttcattccctggtagacaaatccaacatcaaccgacagttggaggtatacacaagcggaggtgaccctgagagtgtggctggggagtatgggcggcactccctctacaaaatgcttggttacttcagcctggtcgggcttctccgcctgcactccctgttaggagattactaccaggccatcaaggtgctggagaacatcgaactgaacaagaagagtatgtattcccgtgtgccagagtgccaggtcaccacatactattatgttgggtttgcatatttgatgatgcgtcgttaccaggatgccatccgggtcttcgccaacatcctcctctacatccagaggaccaagagcatgttccagaggaccacgtacaagtatgagatgattaacaagcagaatgagcagatgcatgcgctgctggccattgccctcacgatgtaccccatgcgtattgatgagagcattcacctccagctgcgggagaaatatggggacaagatgttgcgcatgcagaaaggtgacccacaagtctatgaagaacttttcagttactcctgccccaagttcctgtcgcctgtagtgcccaactatgataatgtgcaccccaactaccacaaagagcccttcctgcagcagctgaaggtgttttctgatgaagtacagcagcaggcccagctttcaaccatccgcagcttcctgaagctctacaccaccatgcctgtggccaagctggctggcttcctggacctcacagagcaggagttccggatccagcttcttgtcttcaaacacaagatgaagaacctcgtgtggaccagcggtatctcagccctggatggtgaatttcagtcagcctcagaggttgacttctacattgataaggacatgatccacatcgcggacaccaaggtcgccaggcgttatggggatttcttcatccgtcagatccacaaatttgaggagcttaatcgaaccctgaagaagatgggacagagaccttgatgatattcacacacattcaggaacctgttttgatgtattataggcaggaagtgtttttgctaccgtgaaacctttacctagatcagccatcagcctgtcaactcagttaacaagttaaggaccgaagtgtttcaagtggatctcagtaaaggatctttggagccagatttgtcgtctcattattgtaggagagaatttgtgggttgtggcagtaatacatttcccatgtgtcctgatgctttcaggatacatcagttgttagtgtttaaattgagttatttttattttgtgcttttgagatggagtctcactctgtct

SEQ ID NO: 60 - protein, 564 aa, Homo sapiens
MSYPADDYESEAAYDPYAYPSDYDMHTGDPKQDLAYERQYEQQTYQVIPEVIKNFIQYFHKTVSDLIDQKVYELQASRVSSDVIDQKVYEIQDIYENSWTKLTERFFKNTPWPEAEAIAPQVGNDAVFLILYKELYYRHIYAKVSGGPSLEQRFESYYNYCNLFNYILNADGPAPLELPNQWLWDIIDEFIYQFQSFSQYRCKTAKKSEEEIDFLRSNPKIWNVHSVLNVLHSLVDKSNINRQLEVYTSGGDPESVAGEYGRHSLYKMLGYFSLVGLLRLHSLLGDYYQAIKVLENIELNKKSMYSRVPECQVTTYYYVGFAYLMMRRYQDAIRVFANILLYIQRTKSMFQRTTYKYEMINKQNEQMHALLAIALTMYPMRIDESIHLQLREKYGDKMLRMQKGDPQVYEELFSYSCPKFLSPVVPNYDNVHPNYHKEPFLQQLKVFSDEVQQQAQLSTIRSFLKLYTTMPVAKLAGFLDLTEQEFRIQLLVFKHKMKNLVWTSGISALDGEFQSASEVDFYIDKDMIHIADTKVARRYGDFFIRQIHKFEELNRTLKKMGQRP

SEQ ID NO: 61 - DNA, 1947 bp, Homo sapiens
gctgaacttccggcctcaggacgcaggcgcgggccgctcatttcgctctttccggcggtgctcgcaagcgaggcagccatgtcttatcccgctgatgattatgagtctgaggcggcttatgacccctacgcttatcccagcgactatgatatgcacacaggagatccaaagcaggaccttgcttatgaacgtcagtatgaacagcaaacctatcaggtgatccctgaggtgatcaaaaacttcatccagtatttccacaaaactgtctcagatttgattgaccagaaagtgtatgagctacaggccagtcgtgtctccagtgatgtcattgaccagaaggtgtatgagatccaggacatctatgagaacagctggaccaagctgactgaaagattcttcaagaatacaccttggcccgaggctgaagccattgctccacaggttggcaatgatgctgtcttcctgattttatacaaagaattatactacaggcacatatatgccaaagtcagttttcagtcattcagtcagtaccgctgtaagactgccaagaagtcagaggaggagattgactttcttcgttccaatcccaaaatctggaatgttcatagtgtcctcaatgtccttcattccctggtagacaaatccaacatcaaccgacagttggaggtatacacaagcggaggtgaccctgagagtgtggctggggagtatgggcggcactccctctacaaaatgcttggttacttcagcctggtcgggcttctccgcctgcactccctgttaggagattactaccaggccatcaaggtgctggagaacatcgaactgaacaagaagagtatgtattcccgtgtgccagagtgccaggtcaccacatactattatgttgggtttgcatatttgatgatgcgtcgttaccaggatgccatccgggtcttcgccaacatcctcctctacatccagaggaccaagagcatgttccagaggaccacgtacaagtatgagatgattaacaagcagaatgagcagatgcatgcgctgctggccattgccctcacgatgtaccccatgcgtattgatgagagcattcacctccagctgcgggagaaatatggggacaagatgttgcgcatgcagaaaggtgacccacaagtctatgaagaacttttcagttactcctgccccaagttcctgtcgcctgtagtgcccaactatgataatgtgcaccccaactaccacaaagagcccttcctgcagcagctgaaggtgttttctgatgaagtacagcagcaggcccagctttcaaccatccgcagcttcctgaagctctacaccaccatgcctgtggccaagctggctggcttcctggacctcacagagcaggagttccggatccagcttcttgtcttcaaacacaagatgaagaacctcgtgtggaccagcggtatctcagccctggatggtgaatttcagtcagcctcagaggttgacttctacattgataaggacatgatccacatcgcggacaccaaggtcgccaggcgttatggggatttcttcatccgtcagatccacaaatttgaggagcttaatcgaaccctgaagaagatgggacagagaccttgatgatattcacacacattcaggaacctgttttgatgtattataggcaggaagtgtttttgctaccgtgaaacctttacctagatcagccatcagcctgtcaactcagttaacaagttaaggaccgaagtgtttcaagtggatctcagtaaaggatctttggagccagatttgtcgtctcattattgtaggagagaatttgtgggttgtggcagtaatacatttcccatgtgtcctgatgctttcaggatacatcagttgttagtgtttaaattgagttatttttattttgtgcttttgagatggagtctcactctgtct

SEQ ID NO: 62 - protein, 516 aa, Homo sapiens
MSYPADDYESEAAYDPYAYPSDYDMHTGDPKQDLAYERQYEQQTYQVIPEVIKNFIQYFHKTVSDLIDQKVYELQASRVSSDVIDQKVYEIQDIYENSWTKLTERFFKNTPWPEAEAIAPQVGNDAVFLILYKELYYRHIYAKVSFQSFSQYRCKTAKKSEEEIDFLRSNPKIWNVHSVLNVLHSLVDKSNINRQLEVYTSGGDPESVAGEYGRHSLYKMLGYFSLVGLLRLHSLLGDYYQAIKVLENIELNKKSMYSRVPECQVTTYYYVGFAYLMMRRYQDAIRVFANILLYIQRTKSMFQRTTYKYEMINKQNEQMHALLAIALTMYPMRIDESIHLQLREKYGDKMLRMQKGDPQVYEELFSYSCPKFLSPVVPNYDNVHPNYHKEPFLQQLKVFSDEVQQQAQLSTIRSFLKLYTTMPVAKLAGFLDLTEQEFRIQLLVFKHKMKNLVWTSGISALDGEFQSASEVDFYIDKDMIHIADTKVARRYGDFFIRQIHKFEELNRTLKKMGQRP

SEQ ID NO: 63 - DNA, 1905 bp, Homo sapiens
gctgtcttttcagtcgggcgctgagtggtttttcggatcatgtctggtggctccgcggattataacagagaacatggcggcccagagggaatggaccccgatggtgtcatcgagagcaactggaatgagattgttgataactttgatgatatgaatttaaaggagtctctccttcgtggcatctatgcttacggttttgagaagccttccgctattcagcagagagctattattccctgtattaaagggtatgatgtgattgctcaagctcagtcaggtactggcaagacagccacatttgctatttccatcctgcaacagttggagattgagttcaaggagacccaagcactagtattggcccccaccagagaactggctcaacagatccaaaaggtaattctggcacttggagactatatgggagccacttgtcatgcctgcattggtggaacaaatgttcgaaatgaaatgcaaaaactgcaggctgaagcaccacatattgttgttggtacacccgggagagtgtttgatatgttaaacagaagatacctttctccaaaatggatcaaaatgtttgttttggatgaagcagatgaaatgttgagccgtggttttaaggatcaaatctatgagattttccaaaaactaaacacaagtattcaggttgtgttgctttctgccacaatgccaactgatgtgttggaagtgaccaaaaaattcatgagagatccaattcgaattctggtgaaaaaggaagaattgacccttgaaggaatcaaacagttttatattaatgttgagagagaggaatggaagttggatacactttgtgacttgtacgagacactgaccattacacaggctgttatttttctcaatacgaggcgcaaggtggactggctgactgagaagatgcatgccagagacttcacagtttctgctctgcatggtgacatggaccagaaggagagagatgttatcatgagggaattccggtcagggtcaagtcgtgttctgatcactactgacttgttggctcgcgggattgatgtgcaacaagtgtctttggttataaattatgatctacctaccaatcgtgaaaactatattcacagaattggcagagggggtcgatttgggaggaaaggtgtggctataaactttgttactgaagaagacaagaggattcttcgtgacattgagactttctacaatactacagtggaggagatgcccatgaatgtggctgaccttatttaattcctgggatgagagttttggatgcagtgctcgctgttgctgaataggcgatcacaacgtgcattgtgcttctttctttgggaatatttgaatcttgtctcaatgctcataacggatcagaaatacagattttgatagcaaagcgacgttagtcgtgagctcttgtgaggaaagtcattggctttatcctctttagagttagactgttggggtgggtataaaagatggggtctgtaaaatctttctttcttagaaatttatttcctagttctgtagaaatggttgtattagatgttctctatcatttaataatatacttgtggactaaaagatataagtgctgtataaaatcagccaattatgttaaactagcatatctgcctttattgtgtttgtcattagcctgagtagaaaggcctttaaaatttttttagaaagcatttgaatgcattttgtttggtattgtatttattcaataaagtatttaattagtgctaagtgtgaactggaccctgttgctaagccccagcaagcaatcctaggtagggtttaatccccagtaaaattgccatattgcacatgtcttaatgaagtttgaatgttaaataaattgtatattcactttaaaaaaaaaaaaaaaaa

SEQ ID NO: 64 - protein, 407 aa, Homo sapiens
MSGGSADYNREHGGPEGMDPDGVIESNWNEIVDNFDDMNLKESLLRGIYAYGFEKPSAIQQRAIIPCIKGYDVIAQAQSGTGKTATFAISILQQLEIEFKETQALVLAPTRELAQQIQKVILALGDYMGATCHACIGGTNVRNEMQKLQAEAPHIVVGTPGRVFDMLNRRYLSPKWIKMFVLDEADEMLSRGFKDQIYEIFQKLNTSIQVVLLSATMPTDVLEVTKKFMRDPIRILVKKEELTLEGIKQFYINVEREEWKLDTLCDLYETLTITQAVIFLNTRRKVDWLTEKMHARDFTVSALHGDMDQKERDVIMREFRSGSSRVLITTDLLARGIDVQQVSLVINYDLPTNRENYIHRIGRGGRFGRKGVAINFVTEEDKRILRDIETFYNTTVEEMPMNVADLI

SEQ ID NO: 65 - DNA, 5085 bp, Homo sapiens
acggatccgcgttcagaaaggcgtgcacttcctacgcctgatcccccgcatcgcaacctcgcagcttccccggcgtgcagcgctcatttaccaattcccttcctgggagttgcggcttccctcgctcggccccactcccgtttaccctttccccagctcccgccttagccaggggcttccccgcctgccgctagggctcgggccgaagcgccgctcagcgccagcctgccgctccccgggctccactttcactttcggtcctgggggagctaggccggcggcagtggtggtggcggcggcgcaagggtgagggcggccccagaaccccaggtaggtagagcaagaagatggtgtttctgcccctcaaatggtcccttgcaaccatgtcatttctactttcctcactgttggctctcttaactgtgtccactccttcatggtgtcagagcactgaagcatctccaaaacgtagtgatgggacaccatttccttggaataaaatacgacttcctgagtacgtcatcccagttcattatgatctcttgatccatgcaaaccttaccacgctgaccttctggggaaccacgaaagtagaaatcacagccagtcagcccaccagcaccatcatcctgcatagtcaccacctgcagatatctagggccaccctcaggaagggagctggagagaggctatcggaagaacccctgcaggtcctggaacacccccgtcaggagcaaattgcactgctggctcccgagcccctccttgtcgggctcccgtacacagttgtcattcactatgctggcaatctttcggagactttccacggattttacaaaagcacctacagaaccaaggaaggggaactgaggatactagcatcaacacaatttgaacccactgcagctagaatggcctttccctgctttgatgaacctgccttcaaagcaagtttctcaatcaaaattagaagagagccaaggcacctagccatctccaatatgccattggtgaaatctgtgactgttgctgaaggactcatagaagaccattttgatgtcactgtgaagatgagcacctatctggtggccttcatcatttcagattttgagtctgtcagcaagataaccaagagtggagtcaaggtttctgtttatgctgtgccagacaagataaatcaagcagattatgcactggatgctgcggtgactcttctagaattttatgaggattatttcagcataccgtatcccctacccaaacaagatcttgctgctattcccgactttcagtctggtgctatggaaaactggggactgacaacatatagagaatctgctctgttgtttgatgcagaaaagtcttctgcatcaagtaagcttggcatcacaatgactgtggcccatgaactggctcaccagtggtttgggaacctggtcactatggaatggtggaatgatctttggctaaatgaaggatttgccaaatttatggagtttgtgtctgtcagtgtgacccatcctgaactgaaagttggagattatttctttggcaaatgttttgacgcaatggaggtagatgctttaaattcctcacaccctgtgtctacacctgtggaaaatcctgctcagatccgggagatgtttgatgatgtttcttatgataagggagcttgtattctgaatatgctaagggagtatcttagtgctgacgcatttaaaagtggtattgtacagtatctccagaagcatagctataaaaatacaaaaaacgaggacctgtgggatagtatggcaagtatttgccctacagatggtgtaaaagggatggatggcttttgctctagaagtcaacattcatcttcatcctcacattggcatcaggaaggggtggatgtgaaaaccatgatgaacacttggacactgcagaagggttttcccctaataaccatcacagtgagggggaggaatgtacacatgaagcaagagcactacatgaagggctctgacggcgccccggacactgggtacctgtggcatgttccattgacattcatcaccagcaaatccgacatggtccatcgatttttgctaaaaacaaaaacagatgtgctcatcctcccagaagaggtggaatggatcaaatttaatgtgggcatgaatggctattacattgtgcattacgaggatgatggatgggactctttgactggccttttaaaaggaacacacacagcagtcagcagtaatgatcgggcgagtctcattaacaatgcatttcagctcgtcagcattgggaagctgtccattgaaaaggccttggatttatccctgtacttgaaacatgaaactgaaattatgcccgtgtttcaaggtttgaatgagctgattcctatgtataagttaatggagaaaagagatatgaatgaagtggaaactcaattcaaggccttcctcatcaggctgctaagggacctcattgataagcagacatggacagacgagggctcagtctcagagcgaatgctgcggagtcaactactactcctcgcctgtgtgcacaactatcagccgtgcgtacagagggcagaaggctatttcagaaagtggaaggaatccaatggaaacttgagcctgcctgtcgacgtgaccttggcagtgtttgctgtgggggcccagagcacagaaggctgggattttctttatagtaaatatcagttttctttgtccagtactgagaaaagccaaattgaatttgccctctgcagaacccaaaataaggaaaagcttcaatggctactagatgaaagctttaagggagataaaataaaaactcaggagtttccacaaattcttacactcattggcaggaacccagtaggatacccactggcctggcaatttctgaggaaaaactggaacaaacttgtacaaaagtttgaacttggctcatcttccatagcccacatggtaatgggtacaacaaatcaattctccacaagaacacggcttgaagaggtaaaaggattcttcagctctttgaaagaaaatggttctcagctccgttgtgtccaacagacaattgaaaccattgaagaaaacatcggttggatggataagaattttgataaaatcagagtgtggctgcaaagtgaaaagcttgaacgtatgtaaaaattcctcccttgccaggttcctgttatctctaatcaccaacattttgttgagtgtattttcaaactagagatggctgttttggctccaactggagatacttttttcccttcaactcattttttgactatccctgtgaaaagaatagctgttagtttttcatgaatgggctatcgctaccatgtgttttgttcatcacaggtgttgccctgcaacgtaaacccaagtgttgggttccctgccacagaagaataaagtaccttattcttctcattttatagtttatgcttaagcacccgtgtccaaaaccctgtaccccatgtttatcattcataaactgtttcatcagtctcctcgaaagactctgaatagtcgactactgaacaatgaacacctggatctgagactaagccggacgatgactgggttaaagctctcccggctcacccctccagacccgctgcccatccctcttccttgctccatgcccaggggctgacttgtaaaggccaagtcatcaagctttcttgccctttggatgttggtcagtggggagccggagagctggagctggggtcggaggaggtagtaggtggaggtgttcttccctgattcccttgcgggatgcctcgggctggcctcccctgagggtcttagctccgagaggggaccctcttttccacacagccttctccacctctggattttggtaactgctccctcctcatcccttcaggattagtggcctcagtgggagtctggcttttactagtcctggcggacttgtggtttctacataatgtgctcgcacttttgcaaaaaatctttttatagaaccctcctcagataattctgagtgagtgtcatctatttccctgactggtacagtatctcttctgaaaaagcagagtgcattcaagtctgtaggaaaacccttttcttagggaggtgattttttttctctctctgcttcttatttggcctactttacaatttctaactaactagttattggcatttactgacagtaaattattgcagtcaccaataaatgatagtacattgtgaaacaaaatatttgctcatattagcaaataggacattctttggctttgaagtctttctttcttttgtgaagacttcacacacggttgcttcagcacacagttgctgctcaggttttatgtatagatgataataatagaaagcacagtttactaacatggtaaaccaacggagttcaagtcaagtcagttaataccctaagaattagattttatttcttattctgaaaacttgctacacagggacttatctaacccatagtgtgctctgttgctgacttgattcaagttgcagcgtgttttgcgctgactctaaggtgcggaaatcctcacacctggcaaaggagaattcaaactgaactttttgaatataaggcaaaaacttcaagataagggaatatgattgatgattggtacgaaaaatgtcaaaatgtgttcccctaatacacgacaaaatagagtgacttctggacataaatctgccatttattaaaccattcactacaacaaataaataggtataaaagtggaattggaatttttatacttatttgttgtagtgaatggtttaataaaaatagaaatcactggtaatttccaccccaaactaaactatttcccttcttttaaaaaaatacacaaccaagattttaatgtaaaatattttgctttaattgtattttatgccttgattaatgaaacatggaaatattgattttcagttttggtcacctgaggaacctatctttgtttgcttttggaaaagcccattttctaaacagatacaatattgccacaacaatgtgcagaaacctttttgataataaaaaattgttctttgcctctaa

SEQ ID NO: 66 - protein, 941 aa, Homo sapiens
MVFLPLKWSLATMSFLLSSLLALLTVSTPSWCQSTEASPKRSDGTPFPWNKIRLPEYVIPVHYDLLIHANLTTLTFWGTTKVEITASQPTSTIILHSHHLQISRATLRKGAGERLSEEPLQVLEHPRQEQIALLAPEPLLVGLPYTVVIHYAGNLSETFHGFYKSTYRTKEGELRILASTQFEPTAARMAFPCFDEPAFKASFSIKIRREPRHLAISNMPLVKSVTVAEGLIEDHFDVTVKMSTYLVAFIISDFESVSKITKSGVKVSVYAVPDKINQADYALDAAVTLLEFYEDYFSIPYPLPKQDLAAIPDFQSGAMENWGLTTYRESALLFDAEKSSASSKLGITMTVAHELAHQWFGNLVTMEWWNDLWLNEGFAKFMEFVSVSVTHPELKVGDYFFGKCFDAMEVDALNSSHPVSTPVENPAQIREMFDDVSYDKGACILNMLREYLSADAFKSGIVQYLQKHSYKNTKNEDLWDSMASICPTDGVKGMDGFCSRSQHSSSSSHWHQEGVDVKTMMNTWTLQKGFPLITITVRGRNVHMKQEHYMKGSDGAPDTGYLWHVPLTFITSKSDMVHRFLLKTKTDVLILPEEVEWIKFNVGMNGYYIVHYEDDGWDSLTGLLKGTHTAVSSNDRASLINNAFQLVSIGKLSIEKALDLSLYLKHETEIMPVFQGLNELIPMYKLMEKRDMNEVETQFKAFLIRLLRDLIDKQTWTDEGSVSERMLRSQLLLLACVHNYQPCVQRAEGYFRKWKESNGNLSLPVDVTLAVFAVGAQSTEGWDFLYSKYQFSLSSTEKSQIEFALCRTQNKEKLQWLLDESFKGDKIKTQEFPQILTLIGRNPVGYPLAWQFLRKNWNKLVQKFELGSSSIAHMVMGTTNQFSTRTRLEEVKGFFSSLKENGSQLRCVQQTIETIEENIGWMDKNFDKIRVWLQSEKLERM

SEQ ID NO: 67 - DNA, 5584 bp, Homo sapiens
acggatccgcgttcagaaaggcgtgcacttcctacgcctgatcccccgcatcgcaacctcgcagcttccccggcgtgcagcgctcatttaccaattcccttcctgggagttgcggcttccctcgctcggccccactcccgtttaccctttccccagctcccgccttagccaggggcttccccgcctgccgctagggctcgggccgaagcgccgctcagcgccagcctgccgctccccgggctccactttcactttcggtcctgggggagctaggccggcggcagtggtggtggcggcggcgcaagggtgagggcggccccagaaccccaggtaggtagagcaagaagatggtgtttctgcccctcaaatggtcccttgcaaccatgtcatttctactttcctcactgttggctctcttaactgtgtccactccttcatggtgtcagagcactgaagcatctccaaaacgtagtgatgggacaccatttccttggaataaaatacgacttcctgagtacgtcatcccagttcattatgatctcttgatccatgcaaaccttaccacgctgaccttctggggaaccacgaaagtagaaatcacagccagtcagcccaccagcaccatcatcctgcatagtcaccacctgcagatatctagggccaccctcaggaagggagctggagagaggctatcggaagaacccctgcaggtcctggaacacccccgtcaggagcaaattgcactgctggctcccgagcccctccttgtcgggctcccgtacacagttgtcattcactatgctggcaatctttcggagactttccacggattttacaaaagcacctacagaaccaaggaaggggaactgaggatactagcatcaacacaatttgaacccactgcagctagaatggcctttccctgctttgatgaacctgccttcaaagcaagtttctcaatcaaaattagaagagagccaaggcacctagccatctccaatatgccattggtgaaatctgtgactgttgctgaaggactcatagaagaccattttgatgtcactgtgaagatgagcacctatctggtggccttcatcatttcagattttgagtctgtcagcaagataaccaagagtggagtcaaggtttctgtttatgctgtgccagacaagataaatcaagcagattatgcactggatgctgcggtgactcttctagaattttatgaggattatttcagcataccgtatcccctacccaaacaagatcttgctgctattcccgactttcagtctggtgctatggaaaactggggactgacaacatatagagaatctgctctgttgtttgatgcagaaaagtcttctgcatcaagtaagcttggcatcacaatgactgtggcccatgaactggctcaccagtggtttgggaacctggtcactatggaatggtggaatgatctttggctaaatgaaggatttgccaaatttatggagtttgtgtctgtcagtgtgacccatcctgaactgaaagttggagattatttctttggcaaatgttttgacgcaatggaggtagatgctttaaattcctcacaccctgtgtctacacctgtggaaaatcctgctcagatccgggagatgtttgatgatgtttcttatgataagggagcttgtattctgaatatgctaagggagtatcttagtgctgacgcatttaaaagtggtattgtacagtatctccagaagcatagctataaaaatacaaaaaacgaggacctgtgggatagtatggcaagtatttgccctacagatggtgtaaaagggatggatggcttttgctctagaagtcaacattcatcttcatcctcacattggcatcaggaaggggtggatgtgaaaaccatgatgaacacttggacactgcagaagggttttcccctaataaccatcacagtgagggggaggaatgtacacatgaagcaagagcactacatgaagggctctgacggcgccccggacactgggtacctgtggcatgttccattgacattcatcaccagcaaatccgacatggtccatcgatttttgctaaaaacaaaaacagatgtgctcatcctcccagaagaggtggaatggatcaaatttaatgtgggcatgaatggctattacattgtgcattacgaggatgatggatgggactctttgactggccttttaaaaggaacacacacagcagtcagcagtaatgatcgggcgagtctcattaacaatgcatttcagctcgtcagcattgggaagctgtccattgaaaaggccttggatttatccctgtacttgaaacatgaaactgaaattatgcccgtgtttcaaggtttgaatgagctgattcctatgtataagttaatggagaaaagagatatgaatgaagtggaaactcaattcaaggccttcctcatcaggctgctaagggacctcattgataagcagacatggacagacgagggctcagtctcagagcgaatgctgcggagtcaactactactcctcgcctgtgtgcacaactatcagccgtgcgtacagagggcagaaggctatttcagaaagtggaaggaatccaatggaaacttgagcctgcctgtcgacgtgaccttggcagtgtttgctgtgggggcccagagcacagaaggctgggattttctttatagtaaatatcagttttctttgtccagtactgagaaaagccaaattgaatttgccctctgcagaacccaaaataaggaaaagcttcaatggctactagatgaaagctttaagggagataaaataaaaactcaggagtttccacaaattcttacactcattggcaggaacccagtaggatacccactggcctggcaatttctgaggaaaaactggaacaaacttgtacaaaagtttgaacttggctcatcttccatagcccacatggtaatgggtacaacaaatcaattctccacaagaacacggcttgaagaggtaaaaggattcttcagctctttgaaagaaaatggttctcagctccgttgtgtccaacagacaattgaaaccattgaagaaaacatcggttggatggataagaattttgataaaatcagagtgtggctgcaaagtgaaaagcttgaacatgatcctgaagctgacgcaacaggatgaaaatccatcagaatctcagactacagcactaaatatgctttgatgctacatcaaacggaatggaagcatagctgacttcgctaaagttacttcatctccatctagcaaatgaggcactgttctcaaccaaaggagatggggatctggtttagggcaatccctttataatttgatgtgctgtggtctccttggtaatgtataatttggtattgcacaggtgattagtcaaggaagtctggaaaagctttggtcccacagccttgcctcacagcatgtaaataattaaaacaatattgatgctgaggttcttctactgctagtatgaaagtgacaaatttttactggtgtgaattgggaagaaaacaatgctattccatgacgtttgtaaaatgtttgtaaaagctcaaacatgacgattccataaaataaacttgaggttaaataatgggtagtaaattatagaatgtataagaaaaaatataaaggagaaaatcaattatcaggaaagctaaagaacttttcaaatctagtaatttgaatatagacacaatgcactttattgcactttcaattcttataaagcaacaataatattaaggtccttgactatgtgtacaatgttttcacatatatagtttcatttaatcatttcaaagttaatctctgccatctcgctaaatcatcagtctcggctcttctgaaatagaaggtgcctgatcttcctaataattctgcctattttcatttgctttaaacaggcgccctattttctttctagttgtggctgcgcaaaaacatttatctcccaaataagatgtgctgcttaccgaggtatcacggggtggggctccagcttgggtcgttgaagctggggtttgggaaaccacttcagagatggcagcagcaagtttagcatcttcaaatttcttttattgaaaaaaattttattagtaacatgttgtatataaaattatgagcacaatgccatcacttaactataactcttaaagatagcttaatgactgtttattctcttgaccaaatagactcataataacatataattttaaaagaaatttaaattctttcttctctattgtattattttatacaatttgctatttctatttccttctcatattgattattctaaatactatgcaataatataacttagagttccacggtttgtttacacatttcctgttgtacatttaggttattcaaagttttcagctcttttaaaattgctctgaataagttctagtgagtgagttatggtgctggctatattttgctaaactgccctctcaaatgttgctaggaattcatactgcgaaaagcaatgaataagcatgcctgttttcccatggccttgcttgccagaatttgacttttattatgataatcagtgtaaaatgatatactactattgcttgtatattgtggtatacggtgtcaggtttcagggttttttttcaacgttaaatattctagaaactttctgaaataatttctgtttaaaaatattgaatatttgcttcatttcaaatactcccttttgacaaaaaaacttaggtataactgttgatgaaaaaccagaaaaaagtccagaactctttggtgactccaactatggatagcttattttgaaaaaggagaattgcaaattttaccaaaagatggagaaaagcacattaaaaagataccaacattcagaaattcatttcagcatgttattattggaaattatttaaactaatttagataactataagatacttattgtccatttataccctgtaaagccgttttagaatgtaatattttaggtaatccaaaatgtactaaattaaattcatttttagttatgagaaatctttgcttatatgacaaatgaaaagaataacaagttgtcaaatgaaaagaatgacattgaaacatttgtattgtctcttcttaaactatcttattgacttattatttaagccttttaatactaagtatgaaacaacctatggtctggaaatttgtatcgcaaagctatatgtgcatatgttatttaattcatctaatgctacacaaaagcataaaataatgatttttcactctctttaaaaatactaaatcatttatgtccatttctcaattttttcattgatctatgctttgagtttgctttctcaacattattgtattttccacttattattactgtataacatatgctagtgtttagttggattaatcttacctaaaagtactgaaaaatgctttttagtactttttcatattttatacatttattttccgaatgtatcattgaataattttattgagttataaaagtatcttattgctatttaataaaaaattaacacataaaatga

SEQ ID NO: 68 - protein, 948 aa, Homo sapiens
MVFLPLKWSLATMSFLLSSLLALLTVSTPSWCQSTEASPKRSDGTPFPWNKIRLPEYVIPVHYDLLIHANLTTLTFWGTTKVEITASQPTSTIILHSHHLQISRATLRKGAGERLSEEPLQVLEHPRQEQIALLAPEPLLVGLPYTVVIHYAGNLSETFHGFYKSTYRTKEGELRILASTQFEPTAARMAFPCFDEPAFKASFSIKIRREPRHLAISNMPLVKSVTVAEGLIEDHFDVTVKMSTYLVAFIISDFESVSKITKSGVKVSVYAVPDKINQADYALDAAVTLLEFYEDYFSIPYPLPKQDLAAIPDFQSGAMENWGLTTYRESALLFDAEKSSASSKLGITMTVAHELAHQWFGNLVTMEWWNDLWLNEGFAKFMEFVSVSVTHPELKVGDYFFGKCFDAMEVDALNSSHPVSTPVENPAQIREMFDDVSYDKGACILNMLREYLSADAFKSGIVQYLQKHSYKNTKNEDLWDSMASICPTDGVKGMDGFCSRSQHSSSSSHWHQEGVDVKTMMNTWTLQKGFPLITITVRGRNVHMKQEHYMKGSDGAPDTGYLWHVPLTFITSKSDMVHRFLLKTKTDVLILPEEVEWIKFNVGMNGYYIVHYEDDGWDSLTGLLKGTHTAVSSNDRASLINNAFQLVSIGKLSIEKALDLSLYLKHETEIMPVFQGLNELIPMYKLMEKRDMNEVETQFKAFLIRLLRDLIDKQTWTDEGSVSERMLRSQLLLLACVHNYQPCVQRAEGYFRKWKESNGNLSLPVDVTLAVFAVGAQSTEGWDFLYSKYQFSLSSTEKSQIEFALCRTQNKEKLQWLLDESFKGDKIKTQEFPQILTLIGRNPVGYPLAWQFLRKNWNKLVQKFELGSSSIAHMVMGTTNQFSTRTRLEEVKGFFSSLKENGSQLRCVQQTIETIEENIGWMDKNFDKIRVWLQSEKLEHDPEADATG

SEQ ID NO: 69 - DNA, 4843 bp, Homo sapiens
ccttcccttctgctgggcctcaggtgagactgcagctccagtcatcatcttgattgcagcccacagaaactaccaacccacagaaactgtaggtagagcaagaagatggtgtttctgcccctcaaatggtcccttgcaaccatgtcatttctactttcctcactgttggctctcttaactgtgtccactccttcatggtgtcagagcactgaagcatctccaaaacgtagtgatgggacaccatttccttggaataaaatacgacttcctgagtacgtcatcccagttcattatgatctcttgatccatgcaaaccttaccacgctgaccttctggggaaccacgaaagtagaaatcacagccagtcagcccaccagcaccatcatcctgcatagtcaccacctgcagatatctagggccaccctcaggaagggagctggagagaggctatcggaagaacccctgcaggtcctggaacacccccgtcaggagcaaattgcactgctggctcccgagcccctccttgtcgggctcccgtacacagttgtcattcactatgctggcaatctttcggagactttccacggattttacaaaagcacctacagaaccaaggaaggggaactgaggatactagcatcaacacaatttgaacccactgcagctagaatggcctttccctgctttgatgaacctgccttcaaagcaagtttctcaatcaaaattagaagagagccaaggcacctagccatctccaatatgccattggtgaaatctgtgactgttgctgaaggactcatagaagaccattttgatgtcactgtgaagatgagcacctatctggtggccttcatcatttcagattttgagtctgtcagcaagataaccaagagtggagtcaaggtttctgtttatgctgtgccagacaagataaatcaagcagattatgcactggatgctgcggtgactcttctagaattttatgaggattatttcagcataccgtatcccctacccaaacaagatcttgctgctattcccgactttcagtctggtgctatggaaaactggggactgacaacatatagagaatctgctctgttgtttgatgcagaaaagtcttctgcatcaagtaagcttggcatcacaatgactgtggcccatgaactggctcaccagtggtttgggaacctggtcactatggaatggtggaatgatctttggctaaatgaaggatttgccaaatttatggagtttgtgtctgtcagtgtgacccatcctgaactgaaagttggagattatttctttggcaaatgttttgacgcaatggaggtagatgctttaaattcctcacaccctgtgtctacacctgtggaaaatcctgctcagatccgggagatgtttgatgatgtttcttatgataagggagcttgtattctgaatatgctaagggagtatcttagtgctgacgcatttaaaagtggtattgtacagtatctccagaagcatagctataaaaatacaaaaaacgaggacctgtgggatagtatggcaagtatttgccctacagatggtgtaaaagggatggatggcttttgctctagaagtcaacattcatcttcatcctcacattggcatcaggaaggggtggatgtgaaaaccatgatgaacacttggacactgcagaagggttttcccctaataaccatcacagtgagggggaggaatgtacacatgaagcaagagcactacatgaagggctctgacggcgccccggacactgggtacctgtggcatgttccattgacattcatcaccagcaaatccgacatggtccatcgatttttgctaaaaacaaaaacagatgtgctcatcctcccagaagaggtggaatggatcaaatttaatgtgggcatgaatggctattacattgtgcattacgaggatgatggatgggactctttgactggccttttaaaaggaacacacacagcagtcagcagtaatgatcgggcgagtctcattaacaatgcatttcagctcgtcagcattgggaagctgtccattgaaaaggccttggatttatccctgtacttgaaacatgaaactgaaattatgcccgtgtttcaaggtttgaatgagctgattcctatgtataagttaatggagaaaagagatatgaatgaagtggaaactcaattcaaggccttcctcatcaggctgctaagggacctcattgataagcagacatggacagacgagggctcagtctcagagcgaatgctgcggagtcaactactactcctcgcctgtgtgcacaactatcagccgtgcgtacagagggcagaaggctatttcagaaagtggaaggaatccaatggaaacttgagcctgcctgtcgacgtgaccttggcagtgtttgctgtgggggcccagagcacagaaggctgggattttctttatagtaaatatcagttttctttgtccagtactgagaaaagccaaattgaatttgccctctgcagaacccaaaataaggaaaagcttcaatggctactagatgaaagctttaagggagataaaataaaaactcaggagtttccacaaattcttacactcattggcaggaacccagtaggatacccactggcctggcaatttctgaggaaaaactggaacaaacttgtacaaaagtttgaacttggctcatcttccatagcccacatggtaatgggtacaacaaatcaattctccacaagaacacggcttgaagaggtaaaaggattcttcagctctttgaaagaaaatggttctcagctccgttgtgtccaacagacaattgaaaccattgaagaaaacatcggttggatggataagaattttgataaaatcagagtgtggctgcaaagtgaaaagcttgaacgtatgtaaaaattcctcccttgccaggttcctgttatctctaatcaccaacattttgttgagtgtattttcaaactagagatggctgttttggctccaactggagatacttttttcccttcaactcattttttgactatccctgtgaaaagaatagctgttagtttttcatgaatgggctatcgctaccatgtgttttgttcatcacaggtgttgccctgcaacgtaaacccaagtgttgggttccctgccacagaagaataaagtaccttattcttctcattttatagtttatgcttaagcacccgtgtccaaaaccctgtaccccatgtttatcattcataaactgtttcatcagtctcctcgaaagactctgaatagtcgactactgaacaatgaacacctggatctgagactaagccggacgatgactgggttaaagctctcccggctcacccctccagacccgctgcccatccctcttccttgctccatgcccaggggctgacttgtaaaggccaagtcatcaagctttcttgccctttggatgttggtcagtggggagccggagagctggagctggggtcggaggaggtagtaggtggaggtgttcttccctgattcccttgcgggatgcctcgggctggcctcccctgagggtcttagctccgagaggggaccctcttttccacacagccttctccacctctggattttggtaactgctccctcctcatcccttcaggattagtggcctcagtgggagtctggcttttactagtcctggcggacttgtggtttctacataatgtgctcgcacttttgcaaaaaatctttttatagaaccctcctcagataattctgagtgagtgtcatctatttccctgactggtacagtatctcttctgaaaaagcagagtgcattcaagtctgtaggaaaacccttttcttagggaggtgattttttttctctctctgcttcttatttggcctactttacaatttctaactaactagttattggcatttactgacagtaaattattgcagtcaccaataaatgatagtacattgtgaaacaaaatatttgctcatattagcaaataggacattctttggctttgaagtctttctttcttttgtgaagacttcacacacggttgcttcagcacacagttgctgctcaggttttatgtatagatgataataatagaaagcacagtttactaacatggtaaaccaacggagttcaagtcaagtcagttaataccctaagaattagattttatttcttattctgaaaacttgctacacagggacttatctaacccatagtgtgctctgttgctgacttgattcaagttgcagcgtgttttgcgctgactctaaggtgcggaaatcctcacacctggcaaaggagaattcaaactgaactttttgaatataaggcaaaaacttcaagataagggaatatgattgatgattggtacgaaaaatgtcaaaatgtgttcccctaatacacgacaaaatagagtgacttctggacataaatctgccatttattaaaccattcactacaacaaataaataggtataaaagtggaattggaatttttatacttatttgttgtagtgaatggtttaataaaaatagaaatcactggtaatttccaccccaaactaaactatttcccttcttttaaaaaaatacacaaccaagattttaatgtaaaatattttgctttaattgtattttatgccttgattaatgaaacatggaaatattgattttcagttttggtcacctgaggaacctatctttgtttgcttttggaaaagcccattttctaaacagatacaatattgccacaacaatgtgcagaaacctttttgataataaaaaattgttctttgcctctaa

SEQ ID NO: 70 - protein, 941 aa, Homo sapiens; identical to SEQ ID NO: 66

SEQ ID NO: 71 - DNA, 4862 bp, Homo sapiens
aggacccggaagtgagggtgtgagaggcctctctggaagttgtcccgggtgttcgccgctggagcccgggtcgagaggacgaggtgccgctgcctggagaatcctccgctgccgtcggctcccggagcccagccctttcctaacccaacccaacctagcccagtcccagccgccagcgcctgtccctgtcacggaccccagcgttaccatgcatcctgccgtcttcctatccttacccgacctcagatgctcccttctgctcctggtaacttgggtttttactcctgtaacaactgaaataacaagtcttgatacagagaatatagatgaaattttaaacaatgctgatgttgctttagtaaatttttatgctgactggtgtcgtttcagtcagatgttgcatccaatttttgaggaagcttccgatgtcattaaggaagaatttccaaatgaaaatcaagtagtgtttgccagagttgattgtgatcagcactctgacatagcccagagatacaggataagcaaatacccaaccctcaaattgtttcgtaatgggatgatgatgaagagagaatacaggggtcagcgatcagtgaaagcattggcagattacatcaggcaacaaaaaagtgaccccattcaagaaattcgggacttagcagaaatcaccactcttgatcgcagcaaaagaaatatcattggatattttgagcaaaaggactcggacaactatagagtttttgaacgagtagcgaatattttgcatgatgactgtgcctttctttctgcatttggggatgtttcaaaaccggaaagatatagtggcgacaacataatctacaaaccaccagggcattctgctccggatatggtgtacttgggagctatgacaaattttgatgtgacttacaattggattcaagataaatgtgttcctcttgtccgagaaataacatttgaaaatggagaggaattgacagaagaaggactgccttttctcatactctttcacatgaaagaagatacagaaagtttagaaatattccagaatgaagtagctcggcaattaataagtgaaaaaggtacaataaactttttacatgccgattgtgacaaatttagacatcctcttctgcacatacagaaaactccagcagattgtcctgtaatcgctattgacagctttaggcatatgtatgtgtttggagacttcaaagatgtattaattcctggaaaactcaagcaattcgtatttgacttacattctggaaaactgcacagagaattccatcatggacctgacccaactgatacagccccaggagagcaagcccaagatgtagcaagcagtccacctgagagctccttccagaaactagcacccagtgaatataggtatactctattgagggatcgagatgagctttaaaaacttgaaaaacagtttgtaagcctttcaacagcagcatcaacctacgtggtggaaatagtaaacctatattttcataattctatgtgtatttttattttgaataaacagaaagaaattttgggtttttaatttttttctccccgactcaaaatgcattgtcatttaatatagtagcctcttaaaaaaaaaaaacctgctaggatttaaaaataaaaatcagaggcctatctccactttaaatctgtcctgtaaaagttttataaatcaaatgaaaggtgacattgccagaaacttaccattaacttgcactactagggtagggaggacttagggatgtttcctgtgtcgtatgtgcttttctttctttcatatgatcaattctgttggtattttcagtatctcatttctcaaagctaaagagatatacattctggatacttgggaggggaataaattaaagttttcacactgtgtactgtgttttactgattggttggatattgcttatgaaaattccatagtggtatttttttggattcttaatgtgtaacttaaacatactttgaagtggaggagagtcataagacagaacatttggcaggaattgtccttatgaaacaagaaaaagaaaatgaaaagtattattaagcttctgtgtttgtctaaaaatgtggcatatggatggcatttaaaactttgaatgaattatacctaaatctgggacagggaggtgacagtggaacaggctaccaatcagaactagatgacttttaaggctcctcctattatgagacttcaatttccaaagagaagaactagcagagaaattgtatttcagtaattttaagctccttctgtcttgtagagtcttgttatagttgtataaatcaaaaacacagaataaggaacatatttaactttttttcattataaaatggttagaggaccctaccccctctagattccctgatttccccaggcctgcagcatacagtaagatgggtccctgtgccaggcctcaatactgccagggaataaaaccagagggagaggaccctcagtgtcatatcaggaagcccagtgccagaggacagacaggttcaaaactggcttttcctctgggcctgggttggtgctataggccaagggtcattttatacttgggtataaatcaatcccagtttgggaaaagattatttttaagcttaaaaggctgacatgtgccattatatgtagtatgtaatatatgtaacatcttccaattcttttaaaataaaattaatatttataatggatatttaatgattgttatttttaaaaaccagcttataattcctcgttatgcatgatttatccaaagtttccatagttttattcaaaataataaatgttaataaggtgataaggggtatatttaatgtattgtatcaaattgtgaataagaaagtaggatggagctttctagaggttgggccttagttctgttatcctcattgcttttaaccaataagttaaatgaagttagagttatggtcttcaggttagattatggaccagatctgtgagggtcagcatggaaattcacattcaacaaggtagcacacaggaccaagagcagcacatgcaatcaactggaataatatagtaatcctgtaactgggtttgaaaaaataatcaacaaaagatacaattcaagggttaggttgcagagagctggcttgagagtagttattatgaaaaaggcctcaaggagtacgtgttcagtatgctctaagatgataaagtggctgttaaaaagggagttgatttgaggaagtattacttagcattcatgcatattgggcttaggctctagccctgccactatcattgtcttctctggactgtgaagtcactgaggacaaggaaactaaatttaatgtctgtatcactagtgcctagaatttctggacacttagtagtcaccatcaggcgtttatttaatgaatgagaagcaaagtgaccttggttacttttttaccctgaggggctcagcactcattaggacttggtgcctaattttataaaaagtcactaagctcaagtgcttggatgaaaggacagcgtggataaaaaggtttttaaaacatggatgttaaggctgttttgcttggagaagacttgggactgggacagtctttagatattatttgaaatgctggcactgtctatctggatcccagggcttgaactaggatttgaggaagtcacagggaagcagatttcagtctgacatttattcagtgcaagttttttggtgctgtagtatatgatgaaagatgtaaagctgaataaagcattatttctgccctagagttgttcacagcctagtcaggcatatggatatgtaaacaatgactgtaacgtgttatagatgtaaagacaaaataaaggttaaagagggcataaaggagcactcaattgcagagatttgaggacattatttttattttgagctttaaaaagatgaataggtgttctcaggaggtagggatctggctgagagggaataatctgagcaaaggtatgaaacagcctaatgcattagagaaaaaagttcttttagtaaggcatttggggttggggaagctagaaaaagaaatgggagctggtcacacagggccttgtgtgccagactaaggggtttgtagtatatattgtaggcagaagagatccatcaacagattgcaagcaaggaagtatgttcactttaaagtttgagaaagaatagtgtggaagcacgtctcaaatttagacttgttccccctctgaaccgtgaatcagaccatttcaggtagaagtcttccccggtttatctgatctactcggggcctcaggcttctcagctgggaagagaggatgcaagaccagactgaagaacacggttgagtccccagaaccaaaagggggcctttctgcttcttagccagctacctcttcgagtttttcaaattgtgagggggaccataaaaggatggaaacttttagatgacattctacaaattatttttttctttaaattaaaagaacctagccaataagatagagaatgggcatctaaggcatctcagagctctctgatgaagccaggttgtcaaagatcatttgcaaaagaagggaaaactggcatgacaaaagctacagagaggagagtgaaatatagaagtgtttgaaatgttcaagctcacaataagcttaaatttatagaaaatgctaaggttgtcaagaaggcttttttttttttcttttttaaacctgagggcaaaaaggaatggataaagtagtgtaatggattgacaatcaggaagaacagaataactcagttttttttctcctacaaggagatatggctggaccaaaataaaatgacatgaaattgcaaaaatgaaaa

SEQ ID NO: 72 - protein, 406 aa, Homo sapiens
MHPAVFLSLPDLRCSLLLLVTWVFTPVTTEITSLDTENIDEILNNADVALVNFYADWCRFSQMLHPIFEEASDVIKEEFPNENQVVFARVDCDQHSDIAQRYRISKYPTLKLFRNGMMMKREYRGQRSVKALADYIRQQKSDPIQEIRDLAEITTLDRSKRNIIGYFEQKDSDNYRVFERVANILHDDCAFLSAFGDVSKPERYSGDNIIYKPPGHSAPDMVYLGAMTNFDVTYNWIQDKCVPLVREITFENGEELTEEGLPFLILFHMKEDTESLEIFQNEVARQLISEKGTINFLHADCDKFRHPLLHIQKTPADCPVIAIDSFRHMYVFGDFKDVLIPGKLKQFVFDLHSGKLHREFHHGPDPTDTAPGEQAQDVASSPPESSFQKLAPSEYRYTLLRDRDEL

SEQ ID NO: 73 - DNA, 933 bp, Homo sapiens
gcagagaggggcgcggggggcgggggtggtggggcttctggactgagccgctgagggtgcgggctgaccctgtaagtggctgcggcgggaagatggcggagctgcgcgtgctcgtagctgtcaagagggtcatcgactacgccgtgaagatccgagtgaagcctgacaggaccggtgtggtcacggatggtgtgaagcactccatgaaccccttctgtgagatcgcggtggaggaggctgtgcggctcaaggagaagaagctggtgaaggaggtcatcgccgtcagctgtgggcctgcacagtgccaggagacgattcgtaccgccctggccatgggtgcagaccgaggtatccacgtggaggtgcccccagcagaagcagaacgcttgggtcccctgcaggtggctcgggtcctggccaagctggcagagaaggagaaggtggacctggtgctgctgggcaaacaggccatcgatgatgactgtaaccagacagggcagatgacagctggatttcttgactggccacagggcacattcgcctcccaggtgacgctggagggggacaagttgaaagtggagcgggagatcgatgggggcctggagaccctgcgcctgaagctgccagctgtggtgacagctgacctgaggctcaacgagccccgctacgccacgctgcccaacatcatgaaagccaagaagaagaagatcgaggtgatcaagcctggggacctgggtgtggacctgacctccaagctctctgtgatcagtgtggaggacccgccccagcgcacggccggcgtcaaggtggagaccactgaggacctggtggccaagctgaaggagattgggcggatttgagcccctcccagagatggcaataaaactgactctcaacatctatctctgttaacttaaaaaaaaaaaaaaaaaa

SEQ ID NO: 74 - protein, 255 aa, Homo sapiens
MAELRVLVAVKRVIDYAVKIRVKPDRTGVVTDGVKHSMNPFCEIAVEEAVRLKEKKLVKEVIAVSCGPAQCQETIRTALAMGADRGIHVEVPPAEAERLGPLQVARVLAKLAEKEKVDLVLLGKQAIDDDCNQTGQMTAGFLDWPQGTFASQVTLEGDKLKVEREIDGGLETLRLKLPAVVTADLRLNEPRYATLPNIMKAKKKKIEVIKPGDLGVDLTSKLSVISVEDPPQRTAGVKVETTEDLVAKLKEIGRI

SEQ ID NO: 75 - DNA, 1318 bp, Homo sapiens
aaagaacaaaaggcttctgtgctgggcagcttgagttttccccaggctgctctattgttgcctgtagctgtgatttttcaggcaggctgctcctctgaggaccacccttaactgtctacctaactggtttttccttttcttctcctcatttgtatttatgtatcagtgtattatgtatttatatacacttggagatacagtaaaatgtacctctcactgtgggttaccataaatactgtaaatttgagaaacactctttcaggcctgagaggagcagtgacaacagtagggatgatcaagtcagatgtccctggtacccaggaatggctggatgagagaaggagacagggtgacctgcccctgcctacaaactctaacccagttctgtccctggagctgtgtgaccccggacaaggccctgcccctttccaggctgtcgttgtcctcatccagcctgggagagggttggcgctgaggcccccaccttcttgcctgtttcctcctgaccccaccccttcccctcctgctgggcagatccgagtgaagcctgacaggaccggtgtggtcacggatggtgtgaagcactccatgaaccccttctgtgagatcgcggtggaggaggctgtgcggctcaaggagaagaagctggtgaaggaggtcatcgccgtcagctgtgggcctgcacagtgccaggagacgattcgtaccgccctggccatgggtgcagaccgaggtatccacgtggaggtgcccccagcagaagcagaacgcttgggtcccctgcaggtggctcgggtcctggccaagctggcagagaaggagaaggtggacctggtgctgctgggcaaacaggccatcgatgatgactgtaaccagacagggcagatgacagctggatttcttgactggccacagggcacattcgcctcccaggtgacgctggagggggacaagttgaaagtggagcgggagatcgatgggggcctggagaccctgcgcctgaagctgccagctgtggtgacagctgacctgaggctcaacgagccccgctacgccacgctgcccaacatcatgaaagccaagaagaagaagatcgaggtgatcaagcctggggacctgggtgtggacctgacctccaagctctctgtgatcagtgtggaggacccgccccagcgcacggccggcgtcaaggtggagaccactgaggacctggtggccaagctgaaggagattgggcggatttgagcccctcccagagatggcaataaaactgactctcaacatctatctctgttaacttaaaaaaaaaaaaaaaaaa

SEQ ID NO: 76 - protein, 346 aa, Homo sapiens
MYLSLWVTINTVNLRNTLSGLRGAVTTVGMIKSDVPGTQEWLDERRRQGDLPLPTNSNPVLSLELCDPGQGPAPFQAVVVLIQPGRGLALRPPPSCLFPPDPTPSPPAGQIRVKPDRTGVVTDGVKHSMNPFCEIAVEEAVRLKEKKLVKEVIAVSCGPAQCQETIRTALAMGADRGIHVEVPPAEAERLGPLQVARVLAKLAEKEKVDLVLLGKQAIDDDCNQTGQMTAGFLDWPQGTFASQVTLEGDKLKVEREIDGGLETLRLKLPAVVTADLRLNEPRYATLPNIMKAKKKKIEVIKPGDLGVDLTSKLSVISVEDPPQRTAGVKVETTEDLVAKLKEIGRI

SEQ ID NO: 77 - DNA, 1853 bp, Homo sapiens
ccccccgcccacccgggcccggacacgctgagcacactggaaggagtcatggcggatggtcaggtggcggaactgctgctccggcggctggaggcgtctgatggcggcctggacagcgccgagttggcggctgagctgggcatggagcaccaggcggtggtgggcgccgtgaagagccttcaggcgctgggcgaggtcatcgaggctgaacttcggtccaccaagcactgggagcttactgcggagggcgaggagattgcccgggagggcagccatgaggcccgtgtgtttcgaagcattcccccagagggcctggcccagagcgagcttatgcgactgcccagtggcaaagtgggcttcagcaaggccatgtccaacaagtggattcgggtggacaagagtgcggctgacgggccccgggtgttccgagtggtggacagcatggaggatgaggtgcagcggcggctccagctggtccgggggggacaggctgagaagctgggggagaaggagaggagcgagctgaggaagaggaagctgttggctgaagtgactctgaagacctactgggtgagcaaaggcagtgcctttagtaccagcatctccaagcaagagacagagctgagcccagagatgatctccagtggctcttggcgggaccggcccttcaagccctacaacttcttggcccacggtgtcctccccgacagcggccaccttcacccgctgctcaaggtccgctcccagttccgacagatcttcctggagatggggttcaccgagatgccgactgataacttcattgagagctccttctggaactttgacgccctcttccagccccagcagcacccagcccgtgaccagcacgacaccttcttccttcgagatccagcggaggccctgcagctcccaatggactatgtccagcgggtcaagcggacccactctcagggcggctacggctcacaggggtacaagtataactggaagctggacgaggcccggaaaaacctactgcgaacccacaccacatcagccagcgcccgtgcgctctaccgccttgcccagaagaagcccttcactccggtcaagtacttctccatcgaccgcgtattccggaatgagaccctggacgccacgcacctggctgagttccaccagatcgagggcgtggtggcggatcatggtctcaccttgggccacctcatgggcgttctgcgggagttcttcaccaagctgggtatcacgcaactccgcttcaagccagcctacaacccatacacagagcccagcatggaggtgttcagctaccaccaaggcctgaagaagtgggtggaggtcggaaactcgggggtcttccgtccagagatgctgctgcccatggggcttcccgagaacgtgtcggtcattgcctggggcctctccctggagcgcccaacgatgatcaaatatggcatcaacaatatccgggagctggtgggccacaaggtgaacctgcagatggtgtatgacagtcccctgtgccgcctggatgccgagccgaggccccctcccacacaggaggctgcgtgacatgggccactctaggacaggtcatcctccccgagtccctgctgctgcgctcctttgcatccctggccagtgaccttgtatttatgaggcctctgtgaggccagcccccaccttcctctttcccacctgtcccaggaccagaatcccagggacagaggactgggtagcaggttccttctgttgtcctgtgtggtgtgtctactgtgagggtgggccctgaggagacctgtgggccacctattgtctaataaagtgggcagttgcccccatctggtggc

SEQ ID NO: 78 - protein, 508 aa, Homo sapiens
MADGQVAELLLRRLEASDGGLDSAELAAELGMEHQAVVGAVKSLQALGEVIEAELRSTKHWELTAEGEEIAREGSHEARVFRSIPPEGLAQSELMRLPSGKVGFSKAMSNKWIRVDKSAADGPRVFRVVDSMEDEVQRRLQLVRGGQAEKLGEKERSELRKRKLLAEVTLKTYWVSKGSAFSTSISKQETELSPEMISSGSWRDRPFKPYNFLAHGVLPDSGHLHPLLKVRSQFRQIFLEMGFTEMPTDNFIESSFWNFDALFQPQQHPARDQHDTFFLRDPAEALQLPMDYVQRVKRTHSQGGYGSQGYKYNWKLDEARKNLLRTHTTSASARALYRLAQKKPFTPVKYFSIDRVFRNETLDATHLAEFHQIEGVVADHGLTLGHLMGVLREFFTKLGITQLRFKPAYNPYTEPSMEVFSYHQGLKKWVEVGNSGVFRPEMLLPMGLPENVSVIAWGLSLERPTMIKYGINNIRELVGHKVNLQMVYDSPLCRLDAEPRPPPTQEAA

SEQ ID NO: 79 - DNA, 3757 bp, Homo sapiens
aatcgctccccgagccgctcctgacccacctaccccagctctcgcgccgcgtgcagaggtgctcaagcctcctcgcggtccgcagtcagtgccgccgcgcccggcctcccgcacgccccgcaggtagcgcccccgcccgcggcccagagtgcgctcgcgccggcaccagctcccggataaacggcgcgccgcgcggagatgacagccgaggagatgaaggcgaccgagagcggggcgcagtcggcgccgctgcccatggagggagtggacatcagccccaaacaggacgaaggcgtgctgaaggtcatcaagagagagggcacaggtacagagatgcccatgattggggaccgagtctttgtccactacactggctggctattagatggcacaaagtttgactccagtctggatcgcaaggacaaattctcctttgacctgggaaaaggggaggtcatcaaggcttgggacattgccatagccaccatgaaggtgggggaggtgtgccacatcacctgcaaaccagaatatgcctacggttcagcaggcagtcctccaaagattccccccaatgccacgcttgtatttgaggtggagttgtttgagtttaagggagaagatctgacggaagaggaagatggcggaatcattcgcagaatacagactcgcggtgaaggctatgctaagcccaatgagggtgctatcgtggaggttgcactggaagggtactacaaggacaagctctttgaccagcgggagctccgctttgagattggcgagggggagaacctggatctgccttatggtctggagagggccattcagcgcatggagaaaggagaacattccatcgtgtacctcaagcccagctatgcttttggcagtgttgggaaggaaaagttccaaatcccaccaaatgctgagctgaaatatgaattacacctcaagagttttgaaaaggccaaggagtcttgggagatgaattcagaagagaagctggaacagagcaccatagtgaaagagcggggcactgtgtacttcaaggaaggtaaatacaagcaagctttactacagtataagaagatcgtgtcttggctggaatatgagtctagtttttccaatgaggaagcacagaaagcacaggcccttcgactggcctctcacctcaacctggccatgtgtcatctgaaactacaggccttctctgctgccattgaaagctgtaacaaggccctagaactggacagcaacaacgagaagggcctcttccgccggggagaggcccacctggccgtgaatgactttgaactggcacgggctgatttccagaaggtcctgcagctctaccccaacaacaaagccgccaagacccagctggctgtgtgccagcagcggatccgaaggcagcttgcccgggagaagaagctctatgccaatatgtttgagaggctggctgaggaggagaacaaggccaaggcagaggcttcctcaggagaccatcccactgacacagagatgaaggaggagcagaagagcaacacggcagggagccagtctcaggtggagacagaagcatagcccctctccaccagccctactcctgcggctgcctgccccccagtctccccactccaccctgttagttttgtaaaaactgaagaattttgagtgaattagacctttatttttctatctggttggatggtggctttaggggaagggggaaaggtgtaggctgggggattgaggtggggaatcattttagctggtgtcagcccctcttcccttcctccattgcacatgaacatatgtccatccatatatattcatcagaatgttaatttattttgctccctctgttaggtccattttctaagggtagaagaggcaagtggtagggatgaggtctgataagaacccagggtggagagggagactcctgggcagccgttttcctcatcctttccctctcccagtccatttccaaatgtggcctccatgtgggtgctagggacatgggaaaaaccactgctatgccatttcttctctctgttcccttcctcacccccgacggtgtggctgatgatgtcttctggtgtcatggtgaccaccccctgttccctgttctggtatttcccctgtcagtttcccctctcggccaggttgtgtcccaaaatcccctcagcctcttctctgcacgttgctgaaggtccaggcttgcctcaagttccatgcttgagcaataaagtggaaacaataaaacctgggtgtcagacaaccctttctgttcagccttggagtggtgggtatgggtgggtacataatgggtagtagcacaatcaaggggtcacccacttagttccagttgagcttaaataagtgagcatctcatgtagatgccatagttgggcaggaagcagccccaccatgcatggcttcctgagcactgcacaggctgccgctgggatttgtgtctatggcttcgcccaaggttcccagcactccctccctccagcaacctggcagttttagtgcctctggttttcttccctgacacttaggaagacgaaagtataaagatctagaagactgggacaccatgcatgttcattttgaagttggaattggtcttctgcctacctctgatctggcagaggtatctgcattttggtttgttaacaaggtaaaactcctggtgtcactgacctcctcctgtcagataacttacatgattaaggttaagagtaaagcagagtgttcacgtccagcttccttctcagccttaacaggaaaaggcttgtgctttttttctaactatgctttgacccttaactcctatggcatgatggggccctgggagaagccaggcagcacaagccagtcatgctgagctgcctccagataatcctggctccaggccagagcccgtgtctgccctcatccctctctcctactgtgagctctccagtcctttcccaacagcgatgtggttgtctgcttagccacatgcctgtatagttccttccagaagaaatgtataatggtggaagatgtatttctgtgtgaaaattttcaccaagtcatacaacacagctgatgctggagccaggattaaaattggggtgtacaagtctcccagtgtgagtatcccttgagcccaagacaccaaggatgcagagaactgtgactgtgccactgcacgccagcctgggcaagagagtgagaccatctcttttttaaaaaagtccctgtgtaactgctttcttactgggcttacctcacatcacagccctgtgtttgtggtttgtgtctgggtcctcttggtatttcaaaagtagtagattcttacgcctgcagccaacaataatcactaactcaagcatttatggagtaagcctagcactgtactgacagcatcacatgagtgaaactgaatccttgcaaccatcctacaaagaaggtataactttaataaccctatttacagataagaaaaccaagactcagaagttaaatggaaaggtgaggtctctgaactaatccagactctcccatgaggttcctttggcaagtcctgggcttctgtcctcatctgcaaaatcgaaagcattcctgaggtttcttccagctctgcatcctgtaggattccaagaatgtaaaactgcatgtaaccgtggaacatctagagataagtcttagtttatgtaacattaaaactgtctagtgaggatgttttgttaaaaaaaaaaaaaaaaaa

SEQ ID NO: 80 - protein, 459 aa, Homo sapiens
MTAEEMKATESGAQSAPLPMEGVDISPKQDEGVLKVIKREGTGTEMPMIGDRVFVHYTGWLLDGTKFDSSLDRKDKFSFDLGKGEVIKAWDIAIATMKVGEVCHITCKPEYAYGSAGSPPKIPPNATLVFEVELFEFKGEDLTEEEDGGIIRRIQTRGEGYAKPNEGAIVEVALEGYYKDKLFDQRELRFEIGEGENLDLPYGLERAIQRMEKGEHSIVYLKPSYAFGSVGKEKFQIPPNAELKYELHLKSFEKAKESWEMNSEEKLEQSTIVKERGTVYFKEGKYKQALLQYKKIVSWLEYESSFSNEEAQKAQALRLASHLNLAMCHLKLQAFSAAIESCNKALELDSNNEKGLFRRGEAHLAVNDFELARADFQKVLQLYPNNKAAKTQLAVCQQRIRRQLAREKKLYANMFERLAEEENKAKAEASSGDHPTDTEMKEEQKSNTAGSQSQVETEA

SEQ ID NO: 81 - DNA, 2106 bp, Homo sapiens
agaagggcgtcgggcggccgtcgggacggaagccgggaggcgctgccgaccgcgcctgcgacagcgtcagccctgcgcggagcgccggcccgatggcggcggcggcggcgatggccgagcaggagagcgcccggaacggcggccgcaaccgcggcggcgtccagcgtgtggagggcaagctgcgcgccagcgtcgagaagggcgactactacgaggcgcaccagatgtaccggaccctgttcttcaggtacatgtcccagagcaagcacacggaggcccgggagctcatgtactcgggagccctgctcttcttcagccatggccagcaaaacagtgcagcagacttgtccatgctggtcctggagtccctggagaaggcggaagtggaggtggctgacgagctgctggaaaatctggctaaagtgttcagcctgatggaccccaactctcctgagcgcgtgacctttgtgtccagagccctgaagtggtccagtgggggctccgggaagctgggccacccccggctgcaccagctgctggccctcaccctgtggaaagaacaaaactattgtgagtcgaggtatcattttctgcactcagcggacggggagggctgtgccaacatgctggtggagtattccacgtcccgcggcttccgcagcgaggtggacatgttcgtggcccaggccgtgctacagtttctctgtttaaaaaacaaaagtagcgcatcggtggtcttcacgacgtacacccagaagcacccgtccatcgaggacgggcctccgtttgtggagccgctgcttaacttcatctggttcctgctgctggctgtggacggtgggaagctgacggtgttcactgtgctgtgtgagcagtaccagccatccctccggcgggaccccatgtacaacgagtacctcgaccgcataggacagctgttcttcggcgtcccgcccaagcagacgtcttcctacgggggcctgctcgggaaccttctgaccagcctcatgggctcctcagagcaggaggatggggaggagagccccagcgacggcagccccatcgagctggactgaactggccaggccacgtggagacaccacggtcgacgacggctggagggacgtttcagaggcgagtcctgggtggctcctcgccttgggggctcctggccctgaggctggcggtggccgcatgccggcgcgtgtctgtttctgtgcggcggctcagggtggcgcggctgctgctcactgtgctgctgggacccaagagtggggcgtcgcccctgctggccgccgcgtcccccgagattgacccacaataaagcacaggccttaccgcggcgtcaccctctcccactcctttgttctgggtcctttcgggagggctgatgggcagcacaggaggcccgtcctcggggggctgcgcacatcacgctccttgccgggcgtccggcacagctgcggtcaccaaagcaggtgctggccctcggacctgagagcccagccagggcccatgtggtctgcaaatgggagcggctgtttttgaacacggggtcattctgcagtcaggacgaaccggtccccgtcgcagacggagtgcacgtgccctgcgccacatcctcacgctcggtggagggacgcgtgcggcgggacggtgcctacgggtacttgcagctgtgtcccatgtggcatcccagagctgcgccctgctggtctctgtgagcgccacgctgctgtgctggaaatgccgctttaaaaagggataccgtgggactctgcccgtctctttcataacgcaatatttatttgtattgggtgatgattgattctttcgacctaacattttgggttttaaccaaataaccggtccaggagtgagcagctccgttctgtcagatgctactccaaatgttaccagaacgatgacaaaaggggagacgctctattttttcacagttaaatgacagttgtagattgatacgcagttgtgcatgggaaggggaaacgcacagctttatttactgtaaagtggaatttcaggaaggcttgtgtgaaccgttgcgcataaataaaccctttctaccggaaaaaaaaaaaaaaaaaa

SEQ ID NO: 82 - protein, 327 aa, Homo sapiens
MAAAAAMAEQESARNGGRNRGGVQRVEGKLRASVEKGDYYEAHQMYRTLFFRYMSQSKHTEARELMYSGALLFFSHGQQNSAADLSMLVLESLEKAEVEVADELLENLAKVFSLMDPNSPERVTFVSRALKWSSGGSGKLGHPRLHQLLALTLWKEQNYCESRYHFLHSADGEGCANMLVEYSTSRGFRSEVDMFVAQAVLQFLCLKNKSSASVVFTTYTQKHPSIEDGPPFVEPLLNFIWFLLLAVDGGKLTVFTVLCEQYQPSLRRDPMYNEYLDRIGQLFFGVPPKQTSSYGGLLGNLLTSLMGSSEQEDGEESPSDGSPIELD

SEQ ID NO: 83 - DNA, 3486 bp, Homo sapiens
gcgctgccgccagcgaggcccggggaggccgcggcggaggcggaggcccggcgccctgggcggcgccctgtccccgaagtccgtcctccccgttaggtggcgagcgcccgaggggaggggacagccgggcaagcaggaagctgcggcttaaaagggcaacccgcgcgggacccttcctccctagtcgcggggagtctgagaaagcgcgcctgtttcgcgaccatcacgcacctcccctccgcttgtggccatgtaccgctacctgggcgaagcgctgttgctgtcccgggccgggcccgctgccctgggctcggcgtccgccgactcggccgcgttgctgggctgggcccggggacagcccgccgccgccccgcagccggggctggcattggccgcccggcgccactacagcgaggcggtggccgaccgcgaggacgaccccaacttcttcaagatggtggagggcttcttcgatcgcggcgccagcatcgtggaggacaagctggtggaggacctgaggacccgggagagcgaggagcagaagcggaaccgggtgcgcggcatcctgcggatcatcaagccctgcaaccatgtgctgagtctctccttccccatccggcgcgacgacggctcctgggaggtcatcgaaggctaccgggcccagcacagccagcaccgcacgccctgcaagggaggtatccgttacagcactgatgtgagtgtagatgaagtaaaagctttggcttctctgatgacatacaagtgtgcagtggttgatgtgccgtttgggggtgctaaagctggtgttaagatcaatcccaagaactatactgataatgaattggaaaagatcacaaggaggttcaccatggagctagcaaaaaagggctttattggtcctggcattgatgtgcctgctccagacatgagcacaggtgagcgggagatgtcctggatcgctgatacctatgccagcaccatagggcactatgatattaatgcacacgcctgtgttactggtaaacccatcagccaagggggaatccatggacgcatctctgctactggccgtggtgtcttccatgggattgaaaatttcatcaatgaagcttcttacatgagcattttaggaatgacaccagggtttggagataaaacatttgttgttcagggatttggtaatgtgggcctacactctatgagatatttacatcgttttggtgctaaatgtattgctgttggtgagtctgatgggagtatatggaatccagatggtattgacccaaaggaactggaagacttcaaattgcaacatgggtccattctgggcttccccaaggcaaagccctatgaaggaagcatcttggaggccgactgtgacatactgatcccagctgccagtgagaagcagttgaccaaatccaacgcacccagagtcaaagccaagatcattgctgaaggtgccaatgggccaacaactccagaagctgacaagatcttcctggagagaaacattatggttattccagatctctacttgaatgctggaggagtgacagtatcttactttgagtggctgaagaatctaaatcatgtcagctatggccgtttgaccttcaaatatgaaagggattctaactaccacttgctcatgtctgttcaagagagtttagaaagaaaatttggaaagcatggtggaactattcccattgtacccacggcagagttccaagacaggatatcgggtgcatctgagaaagacatcgtgcactctggcttggcatacacaatggagcgttctgccaggcaaattatgcgcacagccatgaagtataacctgggattggacctgagaacagctgcctatgttaatgccattgagaaagtcttcaaagtgtacaatgaagctggtgtgaccttcacatagatggatcatggctgacttcctcactatcctcttcacatgtaacttctgcagacctatcacaagtttacatgtaaccacagaaatccctttctctcctgactcattaataatggataccattctcaacaagtcaatccaagtcagcccgttaaggagaaagaaattaaggttagcggatcatgtacaagctgagtgtgaaagtagaaatcacctacaccagagagccattttggtattttgcctttaaataaaaagcctcctttatctggctgtgcagccttgctctgtggcttttcccaacacaatcagtgctagtgctggggaggaacagtcaagagcagtcagttgcttgcttattttttctggatgagtctgggacacactgtaactttaacacatttaagaagtaggtgtgtggccttttcagaaggtggcatggtcctcaagtgagttcttagtattttatatcagcaaaataattcaattttgcaggttgcaaacaaatataaaacctgtttctgtttatgaatattattcttttagaatagaataagtacatgctgctgtaataaaattgcctttaatcacttaacaagcctaaccttgactcaaacagtgaatgcctatagaaataataaatgaaaaaaactagtatttttatatcataaaacaatgtcatttatagcttatcattcatgtattgtccagcagacattaaaagccctgtggataattaagttatcttcatacctgcaaaatggtggaggctattttcattaaaactgtcagaatttgcttactataattatgatacagtccaaagaatgcagtcactttttatcatgttaactaattgttctcttttgaagatctatggttgactaattaaacaataattcaagtagagtgtcccagaaaaaaaccacttgggctccctgtttggagtctggctggctctgagcattgccaatggcccctactcacctgactttgtatcctctccttttagaggctttgcattctgcacccagcttcactaacagtgggctgaaaacatccttgggttgagtgtttcatttgggagttatttggccagggccttttgaacagtagtgtccccatgaagtgctagataatatatgtgtaagagtcagctttttttttttttttaactctaacacccttcagaaatttctaactactttgtaactgcatggcttaacctggtgataaaagcagttattaaaagtctacgttttccaaaacttacgtttcttttctgtgtttttacatgtggtagtttctcttttcataagttataatactgcaattggatttctgaaatgtttatagcgaccacctgtataacatttccttccactttattgtgagctgcccagattttattcttgaattgttttttttttttttgttcggtgctttacacgttcagagaaacttcccgagtaacgaactatagaaatgatccctgaaagcatagtctttattctcgaattattttgtattttattaaataatatgaacagctaaaaaaaaaa

SEQ ID NO: 84 - protein, 558 aa, Homo sapiens
MYRYLGEALLLSRAGPAALGSASADSAALLGWARGQPAAAPQPGLALAARRHYSEAVADREDDPNFFKMVEGFFDRGASIVEDKLVEDLRTRESEEQKRNRVRGILRIIKPCNHVLSLSFPIRRDDGSWEVIEGYRAQHSQHRTPCKGGIRYSTDVSVDEVKALASLMTYKCAVVDVPFGGAKAGVKINPKNYTDNELEKITRRFTMELAKKGFIGPGIDVPAPDMSTGEREMSWIADTYASTIGHYDINAHACVTGKPISQGGIHGRISATGRGVFHGIENFINEASYMSILGMTPGFGDKTFVVQGFGNVGLHSMRYLHRFGAKCIAVGESDGSIWNPDGIDPKELEDFKLQHGSILGFPKAKPYEGSILEADCDILIPAASEKQLTKSNAPRVKAKIIAEGANGPTTPEADKIFLERNIMVIPDLYLNAGGVTVSYFEWLKNLNHVSYGRLTFKYERDSNYHLLMSVQESLERKFGKHGGTIPIVPTAEFQDRISGASEKDIVHSGLAYTMERSARQIMRTAMKYNLGLDLRTAAYVNAIEKVFKVYNEAGVTFT

SEQ ID NO: 85 - DNA, 4463 bp, Homo sapiens
aggaggaggagggtgagagagaagctgggagagcagagaaaaggggccaccggtcgcccccccgcttccccgcacgcgctctccagccgcggccgcccgcctgccgcggtcaccccggcctctgcctctgtcccccagtgatcggatcaaggcgctgagcgaggccctgcctgcggggcggccatgcggcggtgacaggagcgcgaccgacacgcacgggcccctcgccccctctcgcctcccgtccgctcgccagctcccctcagccgaggctgctccgcggcggccgcagcccgcgcgcggcccacactcgcctcccctcggcacccccggccccggagctgcctggaggcggccgcactcggggatcatggcccaagttgcaatgtccaccctccccgttgaagatgaggagtcctcggagagcaggatggtggtgacattcctcatgtcagctctcgagtccatgtgtaaagaactggccaagtccaaagccgaagtggcctgcattgcagtgtatgaaacagacgtgtttgtcgtcggaactgaaagaggacgtgcttttgtcaataccagaaaggattttcaaaaagattttgtaaaatattgtgttgaagaagaagaaaaagctgcagagatgcataaaatgaaatctacaacccaggcaaatcggatgagtgtagatgctgtagaaattgaaacactcagaaaaacagttgaggactatttctgcttttgctatgggaaagctttaggcaaatccacagtggtacctgtaccatatgagaagatgctgcgagaccagtcggctgtggtagtgcaggggcttccggaaggtgttgcctttaaacaccccgagaactatgatcttgcaaccctgaaatggattttggagaacaaagcagggatttcattcatcattaagagaccttttttagagccaaagaagcatgtaggtggtcgtgtgatggtaacagatgctgacaggtcaatactatctccaggtggaagttgtggccccatcaaagtgaaaactgaacccacagaagattctggcatttccctggaaatggcagctgtgacagtaaaggaagaatcagaagatcctgattattatcaatataacattcaaggcccttctgaaactgatgatgttgatgaaaaacagcccctatcgaagcctttgcaaggaagccaccattcttcagagggcaatgaaggcacagaaatggaagtaccagcagaagatgatgattattctccaccgtctaagagaccaaaggccaatgagctaccgcagccaccagtcccggaacccgccaatgctgggaagcggaaagtgagggagttcaacttcgagaaatggaatgctcgcatcactgatctacgtaaacaagttgaagaattgtttgaaaggaaatatgctcaagccataaaagccaaaggtccggtgacgatcccgtaccctcttttccagtctcatgttgaagatctttatgtagaaggacttcctgaaggaattccttttagaaggccatctacttacggaattcctcgcctggagaggatattacttgcaaaggaaaggattcgttttgtgattaagaaacatgagcttctgaattcaacacgtgaagatttacagcttgataagccagcttcaggagtaaaggaagaatggtatgccagaatcactaaattaagaaagatggtggatcagcttttctgcaaaaaatttgcggaagccttggggagcactgaagccaaggctgtaccgtaccaaaaatttgaggcacacccgaatgatctgtacgtggaaggactgccagaaaacattcctttccgaagtccctcatggtatggaatcccaaggctggaaaaaatcattcaagtgggcaatcgaattaaatttgttattaaaagaccagaacttctgactcacagtaccactgaagttactcagccaagaacgaatacaccagtcaaagaagattggaatgtcagaattaccaagctacggaagcaagtggaagagatttttaatttgaaatttgctcaagctcttggactcaccgaggcagtaaaagtaccatatcctgtgtttgaatcaaacccggagttcttgtatgtggaaggcttgccagaggggattcccttccgaagccctacctggtttggaattccacgacttgaaaggatcgtccgcgggagtaataaaatcaagttcgttgttaaaaaacctgaactagttatttcctacttgcctcctgggatggctagtaaaataaacactaaagctttgcagtcccccaaaagaccacgaagtcctgggagtaattcaaaggttcctgaaattgaggtcaccgtggaaggccctaataacaacaatcctcaaacctcagctgttcgaaccccgacccagactaacggttctaacgttcccttcaagccacgagggagagagttttcctttgaggcctggaatgccaaaatcacggacctaaaacagaaagttgaaaatctcttcaatgagaaatgtggggaagctcttggccttaaacaagctgtgaaggtgccgttcgcgttatttgagtctttcccggaagacttttatgtggaaggcttacctgagggtgtgccattccgaagaccatcgacttttggcattccgaggctggagaagatactcagaaacaaagccaaaattaagttcatcattaaaaagcccgaaatgtttgagacggcgattaaggagagcacctcctctaagagccctcccagaaaaataaattcatcacccaatgttaatactactgcatcaggtgttgaagaccttaacatcattcaggtgacaattccagatgatgataatgaaagactctcgaaagttgaaaaagctagacagctaagagaacaagtgaatgacctctttagtcggaaatttggtgaagctattggtatgggttttcctgtgaaagttccctacaggaaaatcacaattaaccctggctgtgtggtggttgatggcatgcccccgggggtgtccttcaaagcccccagctacctggaaatcagctccatgagaaggatcttagactctgccgagtttatcaaattcacggtcattagaccatttccaggacttgtgattaataaccagctggttgatcagagtgagtcagaaggccccgtgatacaagaatcagctgaaccaagccagttggaagttccagccacagaagaaataaaagagactgatggaagctctcagatcaagcaagaaccagaccccacgtggtagacctcttccctcctaggcttaaagtatcagtggttgagaagagcttttcggacctgttactaccccaagctgtgtaatatacttgtataacagaaataccttctatacaaacctttttttctacttttagatagaaatgtctactttttcagcagttctgtgaattaaagagcagagtgactgtgggtctggaatggctggtgtacttgggaatgtactatcaggattttacagcaatgctgggaaatgacagggaaaatgacaggaatgaatctcaccagattttttatgtactcagcagagccttgagttacggtgtttattttccaatcaagtgaagatatctcctacttctcctactggaacatctcagcttctgcagtgaagaaaaattcctgtgatagttcagttctttagtttttctatttgaaaaaaaaaaatcatttaaatgatcctttgttcacggctctccttaatgactgagtgaacagttcctatctgtatatttgactaaaccttttcctaagctatctctcatggttcctatgtttttttatcataattaaaagcaaaaccatctggatcacctaacagtcagaggtcagtatctcagcgtgtgaattatagaggaaatacagagagaacctcttccacttttacttttcgtccaaataaaatgcatggtgtaccagaagttgaagatcgggttgaggattggggctagctcgatgacactaaggccccaacatcgcgggacctgctgtggcgcggattcttaggaacgctgttctagccggccccctctccaggggtcgccgtggccggcattatttcctagttcttcttgtaaccctgaggtgccagcgcggggagtgaggaggggtcagggggctaaggatgcaacctctgacgttctgcgccttcctaggagagtcttacatgtgttgagatttcacaagcaatgcgagttgtaaaataccagctctacaagaagctaggctctgtgacggcatagttttcagtagctttatcacaatattcacaatggagaattatatgacatggtagcagaaataggcccttttatgtgttgcttctattttacctcaaattgtagatatagggtaatcaataaaatccatccatgcctttcacacactaa

SEQ ID NO: 86 - protein, 976 aa, Homo sapiens
MAQVAMSTLPVEDEESSESRMVVTFLMSALESMCKELAKSKAEVACIAVYETDVFVVGTERGRAFVNTRKDFQKDFVKYCVEEEEKAAEMHKMKSTTQANRMSVDAVEIETLRKTVEDYFCFCYGKALGKSTVVPVPYEKMLRDQSAVVVQGLPEGVAFKHPENYDLATLKWILENKAGISFIIKRPFLEPKKHVGGRVMVTDADRSILSPGGSCGPIKVKTEPTEDSGISLEMAAVTVKEESEDPDYYQYNIQGPSETDDVDEKQPLSKPLQGSHHSSEGNEGTEMEVPAEDDDYSPPSKRPKANELPQPPVPEPANAGKRKVREFNFEKWNARITDLRKQVEELFERKYAQAIKAKGPVTIPYPLFQSHVEDLYVEGLPEGIPFRRPSTYGIPRLERILLAKERIRFVIKKHELLNSTREDLQLDKPASGVKEEWYARITKLRKMVDQLFCKKFAEALGSTEAKAVPYQKFEAHPNDLYVEGLPENIPFRSPSWYGIPRLEKIIQVGNRIKFVIKRPELLTHSTTEVTQPRTNTPVKEDWNVRITKLRKQVEEIFNLKFAQALGLTEAVKVPYPVFESNPEFLYVEGLPEGIPFRSPTWFGIPRLERIVRGSNKIKFVVKKPELVISYLPPGMASKINTKALQSPKRPRSPGSNSKVPEIEVTVEGPNNNNPQTSAVRTPTQTNGSNVPFKPRGREFSFEAWNAKITDLKQKVENLFNEKCGEALGLKQAVKVPFALFESFPEDFYVEGLPEGVPFRRPSTFGIPRLEKILRNKAKIKFIIKKPEMFETAIKESTSSKSPPRKINSSPNVNTTASGVEDLNIIQVTIPDDDNERLSKVEKARQLREQVNDLFSRKFGEAIGMGFPVKVPYRKITINPGCVVVDGMPPGVSFKAPSYLEISSMRRILDSAEFIKFTVIRPFPGLVINNQLVDQSESEGPVIQESAEPSQLEVPATEEIKETDGSSQIKQEPDPTW

SEQ ID NO: 87 - DNA, 4406 bp, Homo sapiens
aggaggaggagggtgagagagaagctgggagagcagagaaaaggggccaccggtcgcccccccgcttccccgcacgcgctctccagccgcggccgcccgcctgccgcggtcaccccggcctctgcctctgtcccccagtgatcggatcaaggcgctgagcgaggccctgcctgcggggcggccatgcggcggtgacaggagcgcgaccgacacgcacgggcccctcgccccctctcgcctcccgtccgctcgccagctcccctcagccgaggctgctccgcggcggccgcagcccgcgcgcggcccacactcgcctcccctcggcacccccggccccggagctgcctggaggcggccgcactcggggatcatggcccaagttgcaatgtccaccctccccgttgaagatgaggagtcctcggagagcaggatggtggtgacattcctcatgtcagctctcgagtccatgtgtaaagaactggccaagtccaaagccgaagtggcctgcattgcagtgtatgaaacagacgtgtttgtcgtcggaactgaaagaggacgtgcttttgtcaataccagaaaggattttcaaaaagattttgtaaaatattgtgttgaagaagaagaaaaagctgcagagatgcataaaatgaaatctacaacccaggcaaatcggatgagtgtagatgctgtagaaattgaaacactcagaaaaacagttgaggactatttctgcttttgctatgggaaagctttaggcaaatccacagtggtacctgtaccatatgagaagatgctgcgagaccagtcggctgtggtagtgcaggggcttccggaaggtgttgcctttaaacaccccgagaactatgatcttgcaaccctgaaatggattttggagaacaaagcagggatttcattcatcattaagagaccttttttagagccaaagaagcatgtaggtggtcgtgtgatggtaacagatgctgacaggtcaatactatctccaggtggaagttgtggccccatcaaagtgaaaactgaacccacagaagattctggcatttccctggaaatggcagctgtgacagtaaaggaagaatcagaagatcctgattattatcaatataacattcaaggaagccaccattcttcagagggcaatgaaggcacagaaatggaagtaccagcagaagatgatgattattctccaccgtctaagagaccaaaggccaatgagctaccgcagccaccagtcccggaacccgccaatgctgggaagcggaaagtgagggagttcaacttcgagaaatggaatgctcgcatcactgatctacgtaaacaagttgaagaattgtttgaaaggaaatatgctcaagccataaaagccaaaggtccggtgacgatcccgtaccctcttttccagtctcatgttgaagatctttatgtagaaggacttcctgaaggaattccttttagaaggccatctacttacggaattcctcgcctggagaggatattacttgcaaaggaaaggattcgttttgtgattaagaaacatgagcttctgaattcaacacgtgaagatttacagcttgataagccagcttcaggagtaaaggaagaatggtatgccagaatcactaaattaagaaagatggtggatcagcttttctgcaaaaaatttgcggaagccttggggagcactgaagccaaggctgtaccgtaccaaaaatttgaggcacacccgaatgatctgtacgtggaaggactgccagaaaacattcctttccgaagtccctcatggtatggaatcccaaggctggaaaaaatcattcaagtgggcaatcgaattaaatttgttattaaaagaccagaacttctgactcacagtaccactgaagttactcagccaagaacgaatacaccagtcaaagaagattggaatgtcagaattaccaagctacggaagcaagtggaagagatttttaatttgaaatttgctcaagctcttggactcaccgaggcagtaaaagtaccatatcctgtgtttgaatcaaacccggagttcttgtatgtggaaggcttgccagaggggattcccttccgaagccctacctggtttggaattccacgacttgaaaggatcgtccgcgggagtaataaaatcaagttcgttgttaaaaaacctgaactagttatttcctacttgcctcctgggatggctagtaaaataaacactaaagctttgcagtcccccaaaagaccacgaagtcctgggagtaattcaaaggttcctgaaattgaggtcaccgtggaaggccctaataacaacaatcctcaaacctcagctgttcgaaccccgacccagactaacggttctaacgttcccttcaagccacgagggagagagttttcctttgaggcctggaatgccaaaatcacggacctaaaacagaaagttgaaaatctcttcaatgagaaatgtggggaagctcttggccttaaacaagctgtgaaggtgccgttcgcgttatttgagtctttcccggaagacttttatgtggaaggcttacctgagggtgtgccattccgaagaccatcgacttttggcattccgaggctggagaagatactcagaaacaaagccaaaattaagttcatcattaaaaagcccgaaatgtttgagacggcgattaaggagagcacctcctctaagagccctcccagaaaaataaattcatcacccaatgttaatactactgcatcaggtgttgaagaccttaacatcattcaggtgacaattccagatgatgataatgaaagactctcgaaagttgaaaaagctagacagctaagagaacaagtgaatgacctctttagtcggaaatttggtgaagctattggtatgggttttcctgtgaaagttccctacaggaaaatcacaattaaccctggctgtgtggtggttgatggcatgcccccgggggtgtccttcaaagcccccagctacctggaaatcagctccatgagaaggatcttagactctgccgagtttatcaaattcacggtcattagaccatttccaggacttgtgattaataaccagctggttgatcagagtgagtcagaaggccccgtgatacaagaatcagctgaaccaagccagttggaagttccagccacagaagaaataaaagagactgatggaagctctcagatcaagcaagaaccagaccccacgtggtagacctcttccctcctaggcttaaagtatcagtggttgagaagagcttttcggacctgttactaccccaagctgtgtaatatacttgtataacagaaataccttctatacaaacctttttttctacttttagatagaaatgtctactttttcagcagttctgtgaattaaagagcagagtgactgtgggtctggaatggctggtgtacttgggaatgtactatcaggattttacagcaatgctgggaaatgacagggaaaatgacaggaatgaatctcaccagattttttatgtactcagcagagccttgagttacggtgtttattttccaatcaagtgaagatatctcctacttctcctactggaacatctcagcttctgcagtgaagaaaaattcctgtgatagttcagttctttagtttttctatttgaaaaaaaaaaatcatttaaatgatcctttgttcacggctctccttaatgactgagtgaacagttcctatctgtatatttgactaaaccttttcctaagctatctctcatggttcctatgtttttttatcataattaaaagcaaaaccatctggatcacctaacagtcagaggtcagtatctcagcgtgtgaattatagaggaaatacagagagaacctcttccacttttacttttcgtccaaataaaatgcatggtgtaccagaagttgaagatcgggttgaggattggggctagctcgatgacactaaggccccaacatcgcgggacctgctgtggcgcggattcttaggaacgctgttctagccggccccctctccaggggtcgccgtggccggcattatttcctagttcttcttgtaaccctgaggtgccagcgcggggagtgaggaggggtcagggggctaaggatgcaacctctgacgttctgcgccttcctaggagagtcttacatgtgttgagatttcacaagcaatgcgagttgtaaaataccagctctacaagaagctaggctctgtgacggcatagttttcagtagctttatcacaatattcacaatggagaattatatgacatggtagcagaaataggcccttttatgtgttgcttctattttacctcaaattgtagatatagggtaatcaataaaatccatccatgcctttcacacactaa

SEQ ID NO: 88 - protein, 957 aa, Homo sapiens
MAQVAMSTLPVEDEESSESRMVVTFLMSALESMCKELAKSKAEVACIAVYETDVFVVGTERGRAFVNTRKDFQKDFVKYCVEEEEKAAEMHKMKSTTQANRMSVDAVEIETLRKTVEDYFCFCYGKALGKSTVVPVPYEKMLRDQSAVVVQGLPEGVAFKHPENYDLATLKWILENKAGISFIIKRPFLEPKKHVGGRVMVTDADRSILSPGGSCGPIKVKTEPTEDSGISLEMAAVTVKEESEDPDYYQYNIQGSHHSSEGNEGTEMEVPAEDDDYSPPSKRPKANELPQPPVPEPANAGKRKVREFNFEKWNARITDLRKQVEELFERKYAQAIKAKGPVTIPYPLFQSHVEDLYVEGLPEGIPFRRPSTYGIPRLERILLAKERIRFVIKKHELLNSTREDLQLDKPASGVKEEWYARITKLRKMVDQLFCKKFAEALGSTEAKAVPYQKFEAHPNDLYVEGLPENIPFRSPSWYGIPRLEKIIQVGNRIKFVIKRPELLTHSTTEVTQPRTNTPVKEDWNVRITKLRKQVEEIFNLKFAQALGLTEAVKVPYPVFESNPEFLYVEGLPEGIPFRSPTWFGIPRLERIVRGSNKIKFVVKKPELVISYLPPGMASKINTKALQSPKRPRSPGSNSKVPEIEVTVEGPNNNNPQTSAVRTPTQTNGSNVPFKPRGREFSFEAWNAKITDLKQKVENLFNEKCGEALGLKQAVKVPFALFESFPEDFYVEGLPEGVPFRRPSTFGIPRLEKILRNKAKIKFIIKKPEMFETAIKESTSSKSPPRKINSSPNVNTTASGVEDLNIIQVTIPDDDNERLSKVEKARQLREQVNDLFSRKFGEAIGMGFPVKVPYRKITINPGCVVVDGMPPGVSFKAPSYLEISSMRRILDSAEFIKFTVIRPFPGLVINNQLVDQSESEGPVIQESAEPSQLEVPATEEIKETDGSSQIKQEPDPTW

SEQ ID NO: 89 - DNA, 4529 bp, Homo sapiens
aggaggaggagggtgagagagaagctgggagagcagagaaaaggggccaccggtcgcccccccgcttccccgcacgcgctctccagccgcggccgcccgcctgccgcggtcaccccggcctctgcctctgtcccccagtgatcggatcaaggcgctgagcgaggccctgcctgcggggcggccatgcggcggtgacaggagcgcgaccgacacgcacgggcccctcgccccctctcgcctcccgtccgctcgccagctcccctcagccgaggctgctccgcggcggccgcagcccgcgcgcggcccacactcgcctcccctcggcacccccggccccggagctgcctggaggcggccgcactcggggatcatggcccaagttgcaatgtccaccctccccgttgaagatgaggagtcctcggagagcaggatggtggtgacattcctcatgtcagctctcgagtccatgtgtaaagaactggccaagtccaaagccgaagtggcctgcattgcagtgtatgaaacagacgtgtttgtcgtcggaactgaaagaggacgtgcttttgtcaataccagaaaggattttcaaaaagattttgtaaaatattgtgttgaagaagaagaaaaagctgcagagatgcataaaatgaaatctacaacccaggcaaatcggatgagtgtagatgctgtagaaattgaaacactcagaaaaacagttgaggactatttctgcttttgctatgggaaagctttaggcaaatccacagtggtacctgtaccatatgagaagatgctgcgagaccagtcggctgtggtagtgcaggggcttccggaaggtgttgcctttaaacaccccgagaactatgatcttgcaaccctgaaatggattttggagaacaaagcagggatttcattcatcattaagagaccttttttagagccaaagaagcatgtaggtggtcgtgtgatggtaacagatgctgacaggtcaatactatctccaggtggaagttgtggccccatcaaagtgaaaactgaacccacagaagattctggcatttccctggaaatggcagctgtgacagtaaaggaagaatcagaagatcctgattattatcaatataacattcaagcaggcccttctgaaactgatgatgttgatgaaaaacagcccctatcgaagcctttgcaaggaagccaccattcttcagagggcaatgaaggcacagaaatggaagtaccagcagaagattctactcaacatgtcccttcagaaacaagtgaggaccctgaagttgaggtgactattgaagatgatgattattctccaccgtctaagagaccaaaggccaatgagctaccgcagccaccagtcccggaacccgccaatgctgggaagcggaaagtgagggagttcaacttcgagaaatggaatgctcgcatcactgatctacgtaaacaagttgaagaattgtttgaaaggaaatatgctcaagccataaaagccaaaggtccggtgacgatcccgtaccctcttttccagtctcatgttgaagatctttatgtagaaggacttcctgaaggaattccttttagaaggccatctacttacggaattcctcgcctggagaggatattacttgcaaaggaaaggattcgttttgtgattaagaaacatgagcttctgaattcaacacgtgaagatttacagcttgataagccagcttcaggagtaaaggaagaatggtatgccagaatcactaaattaagaaagatggtggatcagcttttctgcaaaaaatttgcggaagccttggggagcactgaagccaaggctgtaccgtaccaaaaatttgaggcacacccgaatgatctgtacgtggaaggactgccagaaaacattcctttccgaagtccctcatggtatggaatcccaaggctggaaaaaatcattcaagtgggcaatcgaattaaatttgttattaaaagaccagaacttctgactcacagtaccactgaagttactcagccaagaacgaatacaccagtcaaagaagattggaatgtcagaattaccaagctacggaagcaagtggaagagatttttaatttgaaatttgctcaagctcttggactcaccgaggcagtaaaagtaccatatcctgtgtttgaatcaaacccggagttcttgtatgtggaaggcttgccagaggggattcccttccgaagccctacctggtttggaattccacgacttgaaaggatcgtccgcgggagtaataaaatcaagttcgttgttaaaaaacctgaactagttatttcctacttgcctcctgggatggctagtaaaataaacactaaagctttgcagtcccccaaaagaccacgaagtcctgggagtaattcaaaggttcctgaaattgaggtcaccgtggaaggccctaataacaacaatcctcaaacctcagctgttcgaaccccgacccagactaacggttctaacgttcccttcaagccacgagggagagagttttcctttgaggcctggaatgccaaaatcacggacctaaaacagaaagttgaaaatctcttcaatgagaaatgtggggaagctcttggccttaaacaagctgtgaaggtgccgttcgcgttatttgagtctttcccggaagacttttatgtggaaggcttacctgagggtgtgccattccgaagaccatcgacttttggcattccgaggctggagaagatactcagaaacaaagccaaaattaagttcatcattaaaaagcccgaaatgtttgagacggcgattaaggagagcacctcctctaagagccctcccagaaaaataaattcatcacccaatgttaatactactgcatcaggtgttgaagaccttaacatcattcaggtgacaattccagatgatgataatgaaagactctcgaaagttgaaaaagctagacagctaagagaacaagtgaatgacctctttagtcggaaatttggtgaagctattggtatgggttttcctgtgaaagttccctacaggaaaatcacaattaaccctggctgtgtggtggttgatggcatgcccccgggggtgtccttcaaagcccccagctacctggaaatcagctccatgagaaggatcttagactctgccgagtttatcaaattcacggtcattagaccatttccaggacttgtgattaataaccagctggttgatcagagtgagtcagaaggccccgtgatacaagaatcagctgaaccaagccagttggaagttccagccacagaagaaataaaagagactgatggaagctctcagatcaagcaagaaccagaccccacgtggtagacctcttccctcctaggcttaaagtatcagtggttgagaagagcttttcggacctgttactaccccaagctgtgtaatatacttgtataacagaaataccttctatacaaacctttttttctacttttagatagaaatgtctactttttcagcagttctgtgaattaaagagcagagtgactgtgggtctggaatggctggtgtacttgggaatgtactatcaggattttacagcaatgctgggaaatgacagggaaaatgacaggaatgaatctcaccagattttttatgtactcagcagagccttgagttacggtgtttattttccaatcaagtgaagatatctcctacttctcctactggaacatctcagcttctgcagtgaagaaaaattcctgtgatagttcagttctttagtttttctatttgaaaaaaaaaaatcatttaaatgatcctttgttcacggctctccttaatgactgagtgaacagttcctatctgtatatttgactaaaccttttcctaagctatctctcatggttcctatgtttttttatcataattaaaagcaaaaccatctggatcacctaacagtcagaggtcagtatctcagcgtgtgaattatagaggaaatacagagagaacctcttccacttttacttttcgtccaaataaaatgcatggtgtaccagaagttgaagatcgggttgaggattggggctagctcgatgacactaaggccccaacatcgcgggacctgctgtggcgcggattcttaggaacgctgttctagccggccccctctccaggggtcgccgtggccggcattatttcctagttcttcttgtaaccctgaggtgccagcgcggggagtgaggaggggtcagggggctaaggatgcaacctctgacgttctgcgccttcctaggagagtcttacatgtgttgagatttcacaagcaatgcgagttgtaaaataccagctctacaagaagctaggctctgtgacggcatagttttcagtagctttatcacaatattcacaatggagaattatatgacatggtagcagaaataggcccttttatgtgttgcttctattttacctcaaattgtagatatagggtaatcaataaaatccatccatgcctttcacacactaa

SEQ ID NO: 90 - protein, 998 aa, Homo sapiens
MAQVAMSTLPVEDEESSESRMVVTFLMSALESMCKELAKSKAEVACIAVYETDVFVVGTERGRAFVNTRKDFQKDFVKYCVEEEEKAAEMHKMKSTTQANRMSVDAVEIETLRKTVEDYFCFCYGKALGKSTVVPVPYEKMLRDQSAVVVQGLPEGVAFKHPENYDLATLKWILENKAGISFIIKRPFLEPKKHVGGRVMVTDADRSILSPGGSCGPIKVKTEPTEDSGISLEMAAVTVKEESEDPDYYQYNIQAGPSETDDVDEKQPLSKPLQGSHHSSEGNEGTEMEVPAEDSTQHVPSETSEDPEVEVTIEDDDYSPPSKRPKANELPQPPVPEPANAGKRKVREFNFEKWNARITDLRKQVEELFERKYAQAIKAKGPVTIPYPLFQSHVEDLYVEGLPEGIPFRRPSTYGIPRLERILLAKERIRFVIKKHELLNSTREDLQLDKPASGVKEEWYARITKLRKMVDQLFCKKFAEALGSTEAKAVPYQKFEAHPNDLYVEGLPENIPFRSPSWYGIPRLEKIIQVGNRIKFVIKRPELLTHSTTEVTQPRTNTPVKEDWNVRITKLRKQVEEIFNLKFAQALGLTEAVKVPYPVFESNPEFLYVEGLPEGIPFRSPTWFGIPRLERIVRGSNKIKFVVKKPELVISYLPPGMASKINTKALQSPKRPRSPGSNSKVPEIEVTVEGPNNNNPQTSAVRTPTQTNGSNVPFKPRGREFSFEAWNAKITDLKQKVENLFNEKCGEALGLKQAVKVPFALFESFPEDFYVEGLPEGVPFRRPSTFGIPRLEKILRNKAKIKFIIKKPEMFETAIKESTSSKSPPRKINSSPNVNTTASGVEDLNIIQVTIPDDDNERLSKVEKARQLREQVNDLFSRKFGEAIGMGFPVKVPYRKITINPGCVVVDGMPPGVSFKAPSYLEISSMRRILDSAEFIKFTVIRPFPGLVINNQLVDQSESEGPVIQESAEPSQLEVPATEEIKETDGSSQIKQEPDPTW

SEQ ID NO: 91 - DNA, 4469 bp, Homo sapiens
aggaggaggagggtgagagagaagctgggagagcagagaaaaggggccaccggtcgcccccccgcttccccgcacgcgctctccagccgcggccgcccgcctgccgcggtcaccccggcctctgcctctgtcccccagtgatcggatcaaggcgctgagcgaggccctgcctgcggggcggccatgcggcggtgacaggagcgcgaccgacacgcacgggcccctcgccccctctcgcctcccgtccgctcgccagctcccctcagccgaggctgctccgcggcggccgcagcccgcgcgcggcccacactcgcctcccctcggcacccccggccccggagctgcctggaggcggccgcactcggggatcatggcccaagttgcaatgtccaccctccccgttgaagatgaggagtcctcggagagcaggatggtggtgacattcctcatgtcagctctcgagtccatgtgtaaagaactggccaagtccaaagccgaagtggcctgcattgcagtgtatgaaacagacgtgtttgtcgtcggaactgaaagaggacgtgcttttgtcaataccagaaaggattttcaaaaagattttgtaaaatattgtgttgaagaagaagaaaaagctgcagagatgcataaaatgaaatctacaacccaggcaaatcggatgagtgtagatgctgtagaaattgaaacactcagaaaaacagttgaggactatttctgcttttgctatgggaaagctttaggcaaatccacagtggtacctgtaccatatgagaagatgctgcgagaccagtcggctgtggtagtgcaggggcttccggaaggtgttgcctttaaacaccccgagaactatgatcttgcaaccctgaaatggattttggagaacaaagcagggatttcattcatcattaagagaccttttttagagccaaagaagcatgtaggtggtcgtgtgatggtaacagatgctgacaggtcaatactatctccaggtggaagttgtggccccatcaaagtgaaaactgaacccacagaagattctggcatttccctggaaatggcagctgtgacagtaaaggaagaatcagaagatcctgattattatcaatataacattcaaggaagccaccattcttcagagggcaatgaaggcacagaaatggaagtaccagcagaagattctactcaacatgtcccttcagaaacaagtgaggaccctgaagttgaggtgactattgaagatgatgattattctccaccgtctaagagaccaaaggccaatgagctaccgcagccaccagtcccggaacccgccaatgctgggaagcggaaagtgagggagttcaacttcgagaaatggaatgctcgcatcactgatctacgtaaacaagttgaagaattgtttgaaaggaaatatgctcaagccataaaagccaaaggtccggtgacgatcccgtaccctcttttccagtctcatgttgaagatctttatgtagaaggacttcctgaaggaattccttttagaaggccatctacttacggaattcctcgcctggagaggatattacttgcaaaggaaaggattcgttttgtgattaagaaacatgagcttctgaattcaacacgtgaagatttacagcttgataagccagcttcaggagtaaaggaagaatggtatgccagaatcactaaattaagaaagatggtggatcagcttttctgcaaaaaatttgcggaagccttggggagcactgaagccaaggctgtaccgtaccaaaaatttgaggcacacccgaatgatctgtacgtggaaggactgccagaaaacattcctttccgaagtccctcatggtatggaatcccaaggctggaaaaaatcattcaagtgggcaatcgaattaaatttgttattaaaagaccagaacttctgactcacagtaccactgaagttactcagccaagaacgaatacaccagtcaaagaagattggaatgtcagaattaccaagctacggaagcaagtggaagagatttttaatttgaaatttgctcaagctcttggactcaccgaggcagtaaaagtaccatatcctgtgtttgaatcaaacccggagttcttgtatgtggaaggcttgccagaggggattcccttccgaagccctacctggtttggaattccacgacttgaaaggatcgtccgcgggagtaataaaatcaagttcgttgttaaaaaacctgaactagttatttcctacttgcctcctgggatggctagtaaaataaacactaaagctttgcagtcccccaaaagaccacgaagtcctgggagtaattcaaaggttcctgaaattgaggtcaccgtggaaggccctaataacaacaatcctcaaacctcagctgttcgaaccccgacccagactaacggttctaacgttcccttcaagccacgagggagagagttttcctttgaggcctggaatgccaaaatcacggacctaaaacagaaagttgaaaatctcttcaatgagaaatgtggggaagctcttggccttaaacaagctgtgaaggtgccgttcgcgttatttgagtctttcccggaagacttttatgtggaaggcttacctgagggtgtgccattccgaagaccatcgacttttggcattccgaggctggagaagatactcagaaacaaagccaaaattaagttcatcattaaaaagcccgaaatgtttgagacggcgattaaggagagcacctcctctaagagccctcccagaaaaataaattcatcacccaatgttaatactactgcatcaggtgttgaagaccttaacatcattcaggtgacaattccagatgatgataatgaaagactctcgaaagttgaaaaagctagacagctaagagaacaagtgaatgacctctttagtcggaaatttggtgaagctattggtatgggttttcctgtgaaagttccctacaggaaaatcacaattaaccctggctgtgtggtggttgatggcatgcccccgggggtgtccttcaaagcccccagctacctggaaatcagctccatgagaaggatcttagactctgccgagtttatcaaattcacggtcattagaccatttccaggacttgtgattaataaccagctggttgatcagagtgagtcagaaggccccgtgatacaagaatcagctgaaccaagccagttggaagttccagccacagaagaaataaaagagactgatggaagctctcagatcaagcaagaaccagaccccacgtggtagacctcttccctcctaggcttaaagtatcagtggttgagaagagcttttcggacctgttactaccccaagctgtgtaatatacttgtataacagaaataccttctatacaaacctttttttctacttttagatagaaatgtctactttttcagcagttctgtgaattaaagagcagagtgactgtgggtctggaatggctggtgtacttgggaatgtactatcaggattttacagcaatgctgggaaatgacagggaaaatgacaggaatgaatctcaccagattttttatgtactcagcagagccttgagttacggtgtttattttccaatcaagtgaagatatctcctacttctcctactggaacatctcagcttctgcagtgaagaaaaattcctgtgatagttcagttctttagtttttctatttgaaaaaaaaaaatcatttaaatgatcctttgttcacggctctccttaatgactgagtgaacagttcctatctgtatatttgactaaaccttttcctaagctatctctcatggttcctatgtttttttatcataattaaaagcaaaaccatctggatcacctaacagtcagaggtcagtatctcagcgtgtgaattatagaggaaatacagagagaacctcttccacttttacttttcgtccaaataaaatgcatggtgtaccagaagttgaagatcgggttgaggattggggctagctcgatgacactaaggccccaacatcgcgggacctgctgtggcgcggattcttaggaacgctgttctagccggccccctctccaggggtcgccgtggccggcattatttcctagttcttcttgtaaccctgaggtgccagcgcggggagtgaggaggggtcagggggctaaggatgcaacctctgacgttctgcgccttcctaggagagtcttacatgtgttgagatttcacaagcaatgcgagttgtaaaataccagctctacaagaagctaggctctgtgacggcatagttttcagtagctttatcacaatattcacaatggagaattatatgacatggtagcagaaataggcccttttatgtgttgcttctattttacctcaaattgtagatatagggtaatcaataaaatccatccatgcctttcacacactaa

SEQ ID NO: 92 - protein, 978 aa, Homo sapiens
MAQVAMSTLPVEDEESSESRMVVTFLMSALESMCKELAKSKAEVACIAVYETDVFVVGTERGRAFVNTRKDFQKDFVKYCVEEEEKAAEMHKMKSTTQANRMSVDAVEIETLRKTVEDYFCFCYGKALGKSTVVPVPYEKMLRDQSAVVVQGLPEGVAFKHPENYDLATLKWILENKAGISFIIKRPFLEPKKHVGGRVMVTDADRSILSPGGSCGPIKVKTEPTEDSGISLEMAAVTVKEESEDPDYYQYNIQGSHHSSEGNEGTEMEVPAEDSTQHVPSETSEDPEVEVTIEDDDYSPPSKRPKANELPQPPVPEPANAGKRKVREFNFEKWNARITDLRKQVEELFERKYAQAIKAKGPVTIPYPLFQSHVEDLYVEGLPEGIPFRRPSTYGIPRLERILLAKERIRFVIKKHELLNSTREDLQLDKPASGVKEEWYARITKLRKMVDQLFCKKFAEALGSTEAKAVPYQKFEAHPNDLYVEGLPENIPFRSPSWYGIPRLEKIIQVGNRIKFVIKRPELLTHSTTEVTQPRTNTPVKEDWNVRITKLRKQVEEIFNLKFAQALGLTEAVKVPYPVFESNPEFLYVEGLPEGIPFRSPTWFGIPRLERIVRGSNKIKFVVKKPELVISYLPPGMASKINTKALQSPKRPRSPGSNSKVPEIEVTVEGPNNNNPQTSAVRTPTQTNGSNVPFKPRGREFSFEAWNAKITDLKQKVENLFNEKCGEALGLKQAVKVPFALFESFPEDFYVEGLPEGVPFRRPSTFGIPRLEKILRNKAKIKFIIKKPEMFETAIKESTSSKSPPRKINSSPNVNTTASGVEDLNIIQVTIPDDDNERLSKVEKARQLREQVNDLFSRKFGEAIGMGFPVKVPYRKITINPGCVVVDGMPPGVSFKAPSYLEISSMRRILDSAEFIKFTVIRPFPGLVINNQLVDQSESEGPVIQESAEPSQLEVPATEEIKETDGSSQIKQEPDPTW

SEQ ID NO: 93 - DNA, 4466 bp, Homo sapiens
aggaggaggagggtgagagagaagctgggagagcagagaaaaggggccaccggtcgcccccccgcttccccgcacgcgctctccagccgcggccgcccgcctgccgcggtcaccccggcctctgcctctgtcccccagtgatcggatcaaggcgctgagcgaggccctgcctgcggggcggccatgcggcggtgacaggagcgcgaccgacacgcacgggcccctcgccccctctcgcctcccgtccgctcgccagctcccctcagccgaggctgctccgcggcggccgcagcccgcgcgcggcccacactcgcctcccctcggcacccccggccccggagctgcctggaggcggccgcactcggggatcatggcccaagttgcaatgtccaccctccccgttgaagatgaggagtcctcggagagcaggatggtggtgacattcctcatgtcagctctcgagtccatgtgtaaagaactggccaagtccaaagccgaagtggcctgcattgcagtgtatgaaacagacgtgtttgtcgtcggaactgaaagaggacgtgcttttgtcaataccagaaaggattttcaaaaagattttgtaaaatattgtgttgaagaagaagaaaaagctgcagagatgcataaaatgaaatctacaacccaggcaaatcggatgagtgtagatgctgtagaaattgaaacactcagaaaaacagttgaggactatttctgcttttgctatgggaaagctttaggcaaatccacagtggtacctgtaccatatgagaagatgctgcgagaccagtcggctgtggtagtgcaggggcttccggaaggtgttgcctttaaacaccccgagaactatgatcttgcaaccctgaaatggattttggagaacaaagcagggatttcattcatcattaagagaccttttttagagccaaagaagcatgtaggtggtcgtgtgatggtaacagatgctgacaggtcaatactatctccaggtggaagttgtggccccatcaaagtgaaaactgaacccacagaagattctggcatttccctggaaatggcagctgtgacagtaaaggaagaatcagaagatcctgattattatcaatataacattcaagcaggcccttctgaaactgatgatgttgatgaaaaacagcccctatcgaagcctttgcaaggaagccaccattcttcagagggcaatgaaggcacagaaatggaagtaccagcagaagatgatgattattctccaccgtctaagagaccaaaggccaatgagctaccgcagccaccagtcccggaacccgccaatgctgggaagcggaaagtgagggagttcaacttcgagaaatggaatgctcgcatcactgatctacgtaaacaagttgaagaattgtttgaaaggaaatatgctcaagccataaaagccaaaggtccggtgacgatcccgtaccctcttttccagtctcatgttgaagatctttatgtagaaggacttcctgaaggaattccttttagaaggccatctacttacggaattcctcgcctggagaggatattacttgcaaaggaaaggattcgttttgtgattaagaaacatgagcttctgaattcaacacgtgaagatttacagcttgataagccagcttcaggagtaaaggaagaatggtatgccagaatcactaaattaagaaagatggtggatcagcttttctgcaaaaaatttgcggaagccttggggagcactgaagccaaggctgtaccgtaccaaaaatttgaggcacacccgaatgatctgtacgtggaaggactgccagaaaacattcctttccgaagtccctcatggtatggaatcccaaggctggaaaaaatcattcaagtgggcaatcgaattaaatttgttattaaaagaccagaacttctgactcacagtaccactgaagttactcagccaagaacgaatacaccagtcaaagaagattggaatgtcagaattaccaagctacggaagcaagtggaagagatttttaatttgaaatttgctcaagctcttggactcaccgaggcagtaaaagtaccatatcctgtgtttgaatcaaacccggagttcttgtatgtggaaggcttgccagaggggattcccttccgaagccctacctggtttggaattccacgacttgaaaggatcgtccgcgggagtaataaaatcaagttcgttgttaaaaaacctgaactagttatttcctacttgcctcctgggatggctagtaaaataaacactaaagctttgcagtcccccaaaagaccacgaagtcctgggagtaattcaaaggttcctgaaattgaggtcaccgtggaaggccctaataacaacaatcctcaaacctcagctgttcgaaccccgacccagactaacggttctaacgttcccttcaagccacgagggagagagttttcctttgaggcctggaatgccaaaatcacggacctaaaacagaaagttgaaaatctcttcaatgagaaatgtggggaagctcttggccttaaacaagctgtgaaggtgccgttcgcgttatttgagtctttcccggaagacttttatgtggaaggcttacctgagggtgtgccattccgaagaccatcgacttttggcattccgaggctggagaagatactcagaaacaaagccaaaattaagttcatcattaaaaagcccgaaatgtttgagacggcgattaaggagagcacctcctctaagagccctcccagaaaaataaattcatcacccaatgttaatactactgcatcaggtgttgaagaccttaacatcattcaggtgacaattccagatgatgataatgaaagactctcgaaagttgaaaaagctagacagctaagagaacaagtgaatgacctctttagtcggaaatttggtgaagctattggtatgggttttcctgtgaaagttccctacaggaaaatcacaattaaccctggctgtgtggtggttgatggcatgcccccgggggtgtccttcaaagcccccagctacctggaaatcagctccatgagaaggatcttagactctgccgagtttatcaaattcacggtcattagaccatttccaggacttgtgattaataaccagctggttgatcagagtgagtcagaaggccccgtgatacaagaatcagctgaaccaagccagttggaagttccagccacagaagaaataaaagagactgatggaagctctcagatcaagcaagaaccagaccccacgtggtagacctcttccctcctaggcttaaagtatcagtggttgagaagagcttttcggacctgttactaccccaagctgtgtaatatacttgtataacagaaataccttctatacaaacctttttttctacttttagatagaaatgtctactttttcagcagttctgtgaattaaagagcagagtgactgtgggtctggaatggctggtgtacttgggaatgtactatcaggattttacagcaatgctgggaaatgacagggaaaatgacaggaatgaatctcaccagattttttatgtactcagcagagccttgagttacggtgtttattttccaatcaagtgaagatatctcctacttctcctactggaacatctcagcttctgcagtgaagaaaaattcctgtgatagttcagttctttagtttttctatttgaaaaaaaaaaatcatttaaatgatcctttgttcacggctctccttaatgactgagtgaacagttcctatctgtatatttgactaaaccttttcctaagctatctctcatggttcctatgtttttttatcataattaaaagcaaaaccatctggatcacctaacagtcagaggtcagtatctcagcgtgtgaattatagaggaaatacagagagaacctcttccacttttacttttcgtccaaataaaatgcatggtgtaccagaagttgaagatcgggttgaggattggggctagctcgatgacactaaggccccaacatcgcgggacctgctgtggcgcggattcttaggaacgctgttctagccggccccctctccaggggtcgccgtggccggcattatttcctagttcttcttgtaaccctgaggtgccagcgcggggagtgaggaggggtcagggggctaaggatgcaacctctgacgttctgcgccttcctaggagagtcttacatgtgttgagatttcacaagcaatgcgagttgtaaaataccagctctacaagaagctaggctctgtgacggcatagttttcagtagctttatcacaatattcacaatggagaattatatgacatggtagcagaaataggcccttttatgtgttgcttctattttacctcaaattgtagatatagggtaatcaataaaatccatccatgcctttcacacactaa

SEQ ID NO: 94 - protein, 977 aa, Homo sapiens
MAQVAMSTLPVEDEESSESRMVVTFLMSALESMCKELAKSKAEVACIAVYETDVFVVGTERGRAFVNTRKDFQKDFVKYCVEEEEKAAEMHKMKSTTQANRMSVDAVEIETLRKTVEDYFCFCYGKALGKSTVVPVPYEKMLRDQSAVVVQGLPEGVAFKHPENYDLATLKWILENKAGISFIIKRPFLEPKKHVGGRVMVTDADRSILSPGGSCGPIKVKTEPTEDSGISLEMAAVTVKEESEDPDYYQYNIQAGPSETDDVDEKQPLSKPLQGSHHSSEGNEGTEMEVPAEDDDYSPPSKRPKANELPQPPVPEPANAGKRKVREFNFEKWNARITDLRKQVEELFERKYAQAIKAKGPVTIPYPLFQSHVEDLYVEGLPEGIPFRRPSTYGIPRLERILLAKERIRFVIKKHELLNSTREDLQLDKPASGVKEEWYARITKLRKMVDQLFCKKFAEALGSTEAKAVPYQKFEAHPNDLYVEGLPENIPFRSPSWYGIPRLEKIIQVGNRIKFVIKRPELLTHSTTEVTQPRTNTPVKEDWNVRITKLRKQVEEIFNLKFAQALGLTEAVKVPYPVFESNPEFLYVEGLPEGIPFRSPTWFGIPRLERIVRGSNKIKFVVKKPELVISYLPPGMASKINTKALQSPKRPRSPGSNSKVPEIEVTVEGPNNNNPQTSAVRTPTQTNGSNVPFKPRGREFSFEAWNAKITDLKQKVENLFNEKCGEALGLKQAVKVPFALFESFPEDFYVEGLPEGVPFRRPSTFGIPRLEKILRNKAKIKFIIKKPEMFETAIKESTSSKSPPRKINSSPNVNTTASGVEDLNIIQVTIPDDDNERLSKVEKARQLREQVNDLFSRKFGEAIGMGFPVKVPYRKITINPGCVVVDGMPPGVSFKAPSYLEISSMRRILDSAEFIKFTVIRPFPGLVINNQLVDQSESEGPVIQESAEPSQLEVPATEEIKETDGSSQIKQEPDPTW

SEQ ID NO: 95 - DNA, 622 bp, Homo sapiens
cataaaccctggcgcgctcgcgggccggcactcttctggtccccacagactcagagagaacccaccatggtgctgtctcctgccgacaagaccaacgtcaaggccgcctggggtaaggtcggcgcgcacgctggcgagtatggtgcggaggccctggagaggatgttcctgtccttccccaccaccaagacctacttcccgcacttcgacctgagccacggctctgcccaggttaagggccacggcaagaaggtggccgacgcgctgaccaacgccgtggcgcacgtggacgacatgcccaacgcgctgtccgccctgagcgacctgcacgcgcacaagcttcgggtggacccggtcaacttcaagctcctaagccactgcctgctggtgaccctggccgcccacctccccgccgagttcacccctgcggtgcacgcctccctggacaagttcctggcttctgtgagcaccgtgctgacctccaaataccgttaagctggagcctcggtagccgttcctcctgcccgctgggcctcccaacgggccctcctcccctccttgcaccggcccttcctggtctttgaataaagtctgagtgggcagcaaaaaaaaaaaaaaaaaa

SEQ ID NO: 96 - protein, 142 aa, Homo sapiens
MVLSPADKTNVKAAWGKVGAHAGEYGAEALERMFLSFPTTKTYFPHFDLSHGSAQVKGHGKKVADALTNAVAHVDDMPNALSALSDLHAHKLRVDPVNFKLLSHCLLVTLAAHLPAEFTPAVHASLDKFLASVSTVLTSKYR

SEQ ID NO: 97 - DNA, 1611 bp, Homo sapiens
gagaagccaatcagtgtcgtcgcggtcgctgttctaaagtccgcacgcacccaccgggactcagattctccccagacgccgaggatggccgtcatggcgccccgaaccctcctcctgctactctcgggggccctggccctgacccagacctgggcgggctcccactccatgaggtatttcttcacatccgtgtcccggcccggccgcggggagccccgcttcatcgccgtgggctacgtggacgacacgcagttcgtgcggttcgacagcgacgccgcgagccagaagatggagccgcgggcgccgtggatagagcaggaggggccggagtattgggaccaggagacacggaatatgaaggcccactcacagactgaccgagcgaacctggggaccctgcgcggctactacaaccagagcgaggacggttctcacaccatccagataatgtatggctgcgacgtggggccggacgggcgcttcctccgcgggtaccggcaggacgcctacgacggcaaggattacatcgccctgaacgaggacctgcgctcttggaccgcggcggacatggcagctcagatcaccaagcgcaagtgggaggcggtccatgcggcggagcagcggagagtctacctggagggccggtgcgtggacgggctccgcagatacctggagaacgggaaggagacgctgcagcgcacggacccccccaagacacatatgacccaccaccccatctctgaccatgaggccaccctgaggtgctgggccctgggcttctaccctgcggagatcacactgacctggcagcgggatggggaggaccagacccaggacacggagctcgtggagaccaggcctgcaggggatggaaccttccagaagtgggcggctgtggtggtgccttctggagaggagcagagatacacctgccatgtgcagcatgagggtctgcccaagcccctcaccctgagatgggagctgtcttcccagcccaccatccccatcgtgggcatcattgctggcctggttctccttggagctgtgatcactggagctgtggtcgctgccgtgatgtggaggaggaagagctcagatagaaaaggagggagttacactcaggctgcaagcagtgacagtgcccagggctctgatgtgtctctcacagcttgtaaagtgtgagacagctgccttgtgtgggactgagaggcaagagttgttcctgcccttccctttgtgacttgaagaaccctgactttgtttctgcaaaggcacctgcatgtgtctgtgttcgtgtaggcataatgtgaggaggtggggagagcaccccacccccatgtccaccatgaccctcttcccacgctgacctgtgctccctctccaatcatctttcctgttccagagaggtggggctgaggtgtctccatctctgtctcaacttcatggtgcactgagctgtaacttcttccttccctattaaaattagaacctgagtataaatttactttctcaaattcttgccatgagaggttgatgagttaattaaaggagaagattcctaaaatttgagagacaaaattaatggaacgcatgagaaccttccagagtcca

SEQ ID NO: 98 - protein, 365 aa, Homo sapiens
MAVMAPRTLLLLLSGALALTQTWAGSHSMRYFFTSVSRPGRGEPRFIAVGYVDDTQFVRFDSDAASQKMEPRAPWIEQEGPEYWDQETRNMKAHSQTDRANLGTLRGYYNQSEDGSHTIQIMYGCDVGPDGRFLRGYRQDAYDGKDYIALNEDLRSWTAADMAAQITKRKWEAVHAAEQRRVYLEGRCVDGLRRYLENGKETLQRTDPPKTHMTHHPISDHEATLRCWALGFYPAEITLTWQRDGEDQTQDTELVETRPAGDGTFQKWAAVVVPSGEEQRYTCHVQHEGLPKPLTLRWELSSQPTIPIVGIIAGLVLLGAVITGAVVAAVMWRRKSSDRKGGSYTQAASSDSAQGSDVSLTACKV

SEQ ID NO: 99 - DNA, 1636 bp, Homo sapiens
gagaagccaatcagtgtcgtcgcggtcgctgttctaaagcccgcacgcacccaccgggactcagattctccccagacgccgaggatggccgtcatggcgccccgaaccctcctcctgctactctcgggggccctggccctgacccagacctgggcgggctcccactccatgaggtatttcttcacatccgtgtcccggcccggccgcggggagccccgcttcatcgccgtgggctacgtggacgacacgcagttcgtgcggttcgacagcgacgccgcgagccagaggatggagccgcgggcgccgtggatagagcaggaggggccggagtattgggaccaggagacacggaatgtgaaggcccagtcacagactgaccgagtggacctggggaccctgcgcggctactacaaccagagcgaggccggttctcacaccatccagataatgtatggctgcgacgtggggtcggacgggcgcttcctccgcgggtaccggcaggacgcctacgacggcaaggattacatcgccctgaacgaggacctgcgctcttggaccgcggcggacatggcggctcagatcaccaagcgcaagtgggaggcggcccatgaggcggagcagttgagagcctacctggatggcacgtgcgtggagtggctccgcagatacctggagaacgggaaggagacgctgcagcgcacggacccccccaagacacatatgacccaccaccccatctctgaccatgaggccaccctgaggtgctgggccctgggcttctaccctgcggagatcacactgacctggcagcgggatggggaggaccagacccaggacacggagctcgtggagaccaggcctgcaggggatggaaccttccagaagtgggcggctgtggtggtgccttctggagaggagcagagatacacctgccatgtgcagcatgagggtctgcccaagcccctcaccctgagatgggagctgtcttcccagcccaccatccccatcgtgggcatcattgctggcctggttctccttggagctgtgatcactggagctgtggtcgctgccgtgatgtggaggaggaagagctcagatagaaaaggagggagttacactcaggctgcaagcagtgacagtgcccagggctctgatgtgtccctcacagcttgtaaagtgtgagacagctgccttgtgtgggactgagaggcaagagttgttcctgcccttccctttgtgacttgaagaaccctgactttgtttctgcaaaggcacctgcatgtgtctgtgttcgtgtaggcataatgtgaggaggtggggagaccaccccacccccatgtccaccatgaccctcttcccacgctgacctgtgctccctccccaatcatctttcctgttccagagaggtggggctgaggtgtctccatctctgtctcaacttcatggtgcactgagctgtaacttcttccttccctattaaaattagaaccttagtataaatttactttctcaaattcttgccatgagaggttgatgagttaattaaaggagaagattcctaaaatttgagagacaaaataaatggaagacatgagaaccttccagagtccaaaaaaaaaaaaaaaaaaaaaaaaaa

SEQ ID NO: 100 - protein, 365 aa, Homo sapiens
MAVMAPRTLLLLLSGALALTQTWAGSHSMRYFFTSVSRPGRGEPRFIAVGYVDDTQFVRFDSDAASQRMEPRAPWIEQEGPEYWDQETRNVKAQSQTDRVDLGTLRGYYNQSEAGSHTIQIMYGCDVGSDGRFLRGYRQDAYDGKDYIALNEDLRSWTAADMAAQITKRKWEAAHEAEQLRAYLDGTCVEWLRRYLENGKETLQRTDPPKTHMTHHPISDHEATLRCWALGFYPAEITLTWQRDGEDQTQDTELVETRPAGDGTFQKWAAVVVPSGEEQRYTCHVQHEGLPKPLTLRWELSSQPTIPIVGIIAGLVLLGAVITGAVVAAVMWRRKSSDRKGGSYTQAASSDSAQGSDVSLTACKV

SEQ ID NO: 101 - DNA, 1664 bp, Homo sapiens
tttttattctttctgccaggtacatcagatccatcaggtccgagctgtgttgactaccactgcttttcccttcgtctcagttatgtcttggaagaaggctttgcggatccccggagaccttcgggtagcaactgtcaccttgatgctggcgatgctgagctccctactggctgagggcagagactctcccgaggatttcgtgttccagtttaagggcatgtgctacttcaccaacgggacggagcgcgtgcgtcttgtgaccagatacatctataaccgagaggagtacgcgcgcttcgacagcgacgtgggggtgtaccgcgcggtgacgccgcaggggcggcctgatgccgagtactggaacagccagaaggaagtcctggaggggacccgggcggagttggacacggtgtgcagacacaactacgaggtggcgttccgcgggatcttgcagaggagagtggagcccacagtgaccatctccccatccaggacagaggccctcaaccaccacaacctgctggtctgctcggtgacagatttctatccaggccagatcaaagtccggtggtttcggaatgatcaggaggagacagccggcgttgtgtccaccccccttattaggaatggtgactggactttccagatcctggtgatgctggaaatgactccccagcgtggagatgtctacacctgccacgtggagcaccccagcctccagagccccatcaccgtggagtggcgggctcagtctgaatctgcccagagcaagatgctgagtggcgttggaggcttcgtgctggggctgatcttccttgggctgggccttatcatccgtcaaaggagtcagaaaggacctcaagggcctccaccagcagggcttctgcactgactcctgagactattttaactaggattggttatcactcttctgtgatgcctgcttatgcctgcccagaattcccagctgcctgtgtcagcttgtccccctgagatcaaagtcctacagtggctgtcacgcagccaccaggtcatctcctttcatccccaccccaaggcgctggctgtgactctgcttcctgcactgacccagagcctctgcctgtgcatggccagctgcgtctactcaggtcccaaggggtttctgtttctattctttcctcagactgctcaagagaagcacatgaaaaacattacctgactttagagcttttttacataattaaacatgatcctgagttatctgtattctgaactttcttaattgagaagaggcaggaaatcactgcagaatgaaggaacatcccttgaggtgacccagcaaacctgtggccagaaggaggattgtaccttgaaaagacactgaaagcattttggggtgtgaagtaagggtgggcagaggaggtagaaaataattcaattgtcgcatcattcatggttctttaatactgatgctcagtgcattggccttagaatatcccagcctctcttctggtttggtgagtgctgtgtaaataagcatggtagaattgtttggagacatatatagtgatccttggtcactggtgtttcaaacattctggaaagtcacatcgatcaagaatattttttatttttaagaaagcataaccagcaataaaaatactatttttgagtctaaatga

SEQ ID NO: 102 - protein, 269 aa, Homo sapiens
MSWKKALRIPGDLRVATVTLMLAMLSSLLAEGRDSPEDFVFQFKGMCYFTNGTERVRLVTRYIYNREEYARFDSDVGVYRAVTPQGRPDAEYWNSQKEVLEGTRAELDTVCRHNYEVAFRGILQRRVEPTVTISPSRTEALNHHNLLVCSVTDFYPGQIKVRWFRNDQEETAGVVSTPLIRNGDWTFQILVMLEMTPQRGDVYTCHVEHPSLQSPITVEWRAQSESAQSKMLSGVGGFVLGLIFLGLGLIIRQRSQKGPQGPPPAGLLH

SEQ ID NO: 103 - DNA, 1638 bp, Homo sapiens
tttttattctttctgccaggtacatcagatccatcaggtccgagctgtgttgactaccacttttcccttcgtctcaattatgtcttggaaaaaggctttgcggatccccggaggccttcgggcagcaactgtgaccttgatgctgtcgatgctgagcaccccagtggctgagggcagagactctcccgaggatttcgtgtaccagtttaagggcatgtgctacttcaccaacgggacagagcgcgtgcgtcttgtgagcagaagcatctataaccgagaagagatcgtgcgcttcgacagcgacgtgggggagttccgggcggtgacgctgctggggctgcctgccgccgagtactggaacagccagaaggacatcctggagaggaaacgggcggcggtggacagggtgtgcagacacaactaccagttggagctccgcacgaccttgcagcggcgagtggagcccacagtgaccatctccccatccaggacagaggccctcaaccaccacaacctgctggtctgctcggtgacagatttctatccagcccagatcaaagtccggtggtttcggaatgaccaggaggagacagctggcgttgtgtccaccccccttattaggaatggtgactggaccttccagatcctggtgatgctggaaatgactccccagcgtggagacgtctacacctgccacgtggagcaccccagcctccagagccccatcaccgtggagtggcgggctcaatctgaatctgcccagagcaagatgctgagtggcattggaggcttcgtgctggggctgatcttcctcgggctgggccttatcatccatcacaggagtcagaaagggctcctgcactgactcctgagactattttaactgggattggttatcacttttctgtaacgcctgcttgtccctgcccagaattcccagctgtctgtgtcagcctgtccccctgagatcagagtcctacagtggctgtcacgcagccaccaggtcatctcctttcatccccaccttgaggcggatggctgtgaccctacttcctgcactgacccacagcctctgcctgtgcacggccagctgcatctactcaggccccaaggggtttctgtttctattctctcctcagactgctcaagagaagcacatgaaaaccattacctgactttagagcttttttacataattaaacatgatcctgagttatctgtattctgaacttccttaattgagcagaggcaggaaatcactgcagaatgaaggaacataccttgaggtgacccagccaacctgtgcccagaaggagggttgtaccttgaaaagacactgaaagaatttggggtgcaaagtcatggtgggcagaggaggtagaaaatcaactcagttgttgcatcattcatggttctttcatattgatgttcagtgcagtggcctgagaatatcccagcctctcttctggtttggtgagtgctatataagtaaacatggtggaattgtttgggggcagatatagtgacccttggtcactggtgtttcaaacattctggcaagtcacatcaatcaagaataatttttacttttaagaaagcataaccagcaataaaagtattatttttgattctaaatga

SEQ ID NO: 104 - protein, 261 aa, Homo sapiens
MSWKKALRIPGGLRAATVTLMLSMLSTPVAEGRDSPEDFVYQFKGMCYFTNGTERVRLVSRSIYNREEIVRFDSDVGEFRAVTLLGLPAAEYWNSQKDILERKRAAVDRVCRHNYQLELRTTLQRRVEPTVTISPSRTEALNHHNLLVCSVTDFYPAQIKVRWFRNDQEETAGVVSTPLIRNGDWTFQILVMLEMTPQRGDVYTCHVEHPSLQSPITVEWRAQSESAQSKMLSGIGGFVLGLIFLGLGLIIHHRSQKGLLH

SEQ ID NO: 105 - DNA, 1656 bp, Homo sapiens
tttttattctttctgccaggtacatcagatccatcaggtccgagctgtgttgactaccactgcttttcccttcgtctcagttatgtcttggaagaaggctttgcggatccccggagaccttcgggtagcaactgtcaccttgatgctggcgatgctgagctccctactggctgagggcagagactctcccgaggatttcgtgttccagtttaagggcatgtgctacttcaccaacgggacggagcgcgtgcgtcttgtgaccagatacatctataaccgagaggagtacgcgcgcttcgacagcgacgtgggggtgtaccgcgcggtgacgccgcaggggcggcctgatgccgagtactggaacagccagaaggaagtcctggaggggacccgggcggagttggacacggtgtgcagacacaactacgaggtggcgttccgcgggatcttgcagaggagagtggagcccacagtgaccatctccccatccaggacagaggccctcaaccaccacaacctgctggtctgctcggtgacagatttctatccaggccagatcaaagtccggtggtttcggaatgatcaggaggagacagccggcgttgtgtccaccccccttattaggaatggtgactggactttccagatcctggtgatgctggaaatgactccccagcgtggagatgtctacacctgccacgtggagcaccccagcctccagagccccatcaccgtggagtggcgggctcagtctgaatctgcccagagcaagatgctgagtggcgttggaggcttcgtgctggggctgatcttccttgggctgggccttatcatccgtcaaaggagtcagaaagggcttctgcactgactcctgagactattttaactaggattggttatcactcttctgtgatgcctgcttatgcctgcccagaattcccagctgcctgtgtcagcttgtccccctgagatcaaagtcctacagtggctgtcacgcagccaccaggtcatctcctttcatccccaccccaaggcgctggctgtgactctgcttcctgcactgacccagagcctctgcctgtgcatggccagctgcgtctactcaggtcccaaggggtttctgtttctattctttcctcagactgctcaagagaagcacatgaaaaacattacctgactttagagcttttttacataattaaacatgatcctgagttatctgtattctgaactttcttaattgagaagaggcaggaaatcactgcagaatgaaggaacatcccttgaggtgacccagcaaacctgtggccagaaggaggattgtaccttgaaaagacactgaaagcattttggggtgtgaagtaagggtgggcagaggaggtagaaaataattcaattgtcgcatcattcatggttctttaatactgatgctcagtgcattggccttagaatatcccagcctctcttctggtttggtgagtgctgtgtaaataagcatggtagaattgtttggagacatatatagtgatccttggtcactggtgtttcaaacattctggaaagtcacatcgatcaagaatattttttatttttaagaaagcataaccagcaataaaaatactatttttgagtctaaatgaaaaaaaaaaaaaaaaa

SEQ ID NO: 106 - protein, 261 aa, Homo sapiens
MSWKKALRIPGDLRVATVTLMLAMLSSLLAEGRDSPEDFVFQFKGMCYFTNGTERVRLVTRYIYNREEYARFDSDVGVYRAVTPQGRPDAEYWNSQKEVLEGTRAELDTVCRHNYEVAFRGILQRRVEPTVTISPSRTEALNHHNLLVCSVTDFYPGQIKVRWFRNDQEETAGVVSTPLIRNGDWTFQILVMLEMTPQRGDVYTCHVEHPSLQSPITVEWRAQSESAQSKMLSGVGGFVLGLIFLGLGLIIRQRSQKGLLH

SEQ ID NO: 107 - DNA, 1312 bp, Homo sapiens
ttttaatggtcagactctattacaccccacattctcttttcttttattcttgtctgttctgcctcactcccgagctctactgactcccaacagagcgcccaagaagaaaatggccataagtggagtccctgtgctaggatttttcatcatagctgtgctgatgagcgctcaggaatcatgggctatcaaagaagaacatgtgatcatccaggccgagttctatctgaatcctgaccaatcaggcgagtttatgtttgactttgatggtgatgagattttccatgtggatatggcaaagaaggagacggtctggcggcttgaagaatttggacgatttgccagctttgaggctcaaggtgcattggccaacatagctgtggacaaagccaacctggaaatcatgacaaagcgctccaactatactccgatcaccaatgtacctccagaggtaactgtgctcacaaacagccctgtggaactgagagagcccaacgtcctcatctgtttcatagacaagttcaccccaccagtggtcaatgtcacgtggcttcgaaatggaaaacctgtcaccacaggagtgtcagagacagtcttcctgcccagggaagaccaccttttccgcaagttccactatctccccttcctgccctcaactgaggacgtttacgactgcagggtggagcactggggcttggatgagcctcttctcaagcactgggagtttgatgctccaagccctctcccagagactacagagaacgtggtgtgtgccctgggcctgactgtgggtctggtgggcatcattattgggaccatcttcatcatcaagggattgcgcaaaagcaatgcagcagaacgcagggggcctctgtaaggcacatggaggtgatggtgtttcttagagagaagatcactgaagaaacttctgctttaatggctttacaaagctggcaatattacaatccttgacctcagtgaaagcagtcatcttcagcattttccagccctatagccaccccaagtgtggatatgcctcttcgattgctccgtactctaacatctagctggcttccctgtctattgccttttcctgtatctattttcctctatttcctatcattttattatcaccatgcaatgcctctggaataaaacatacaggagtctgtctctgctatggaatgccccatggggcatctcttgtgtacttattgtttaaggtttcctcaaactgtgatttttctgaacacaataaactattttgatgatcttgggtggaaaaaaaaaaaaaaaaaaaaaaaaaaaaaaaaaa

SEQ ID NO: 108 - protein, 254 aa, Homo sapiens
MAISGVPVLGFFIIAVLMSAQESWAIKEEHVIIQAEFYLNPDQSGEFMFDFDGDEIFHVDMAKKETVWRLEEFGRFASFEAQGALANIAVDKANLEIMTKRSNYTPITNVPPEVTVLTNSPVELREPNVLICFIDKFTPPVVNVTWLRNGKPVTTGVSETVFLPREDHLFRKFHYLPFLPSTEDVYDCRVEHWGLDEPLLKHWEFDAPSPLPETTENVVCALGLTVGLVGIIIGTIFIIKGLRKSNAAERRGPL

SEQ ID NO: 109 - DNA, 2547 bp, Homo sapiens
tggttgcgtcgggtcacgtgggcgcgcaggcgcagcgcggtgcagcccgttcgctcacacaaagcccagacgcggagaaaatggcggcaggggtcgaagcggcggcggaggtggcggcgacggagatcaaaatggaggaagagagcggcgcgcccggcgtgccgagcggcaacggggctccgggccctaagggtgaaggagaacgacctgctcagaatgagaagaggaaggagaaaaacataaaaagaggaggcaatcgctttgagccatatgccaatccaactaaaagatacagagccttcattacaaacataccttttgatgtgaaatggcagtcacttaaagacctggttaaagaaaaagttggtgaggtaacatacgtggagctcttaatggacgctgaaggaaagtcaaggggatgtgctgttgttgaattcaagatggaagagagcatgaaaaaagctgcggaagtcctaaacaagcatagtctgagcggaagaccactgaaagtcaaagaagatcctgatggtgaacatgccaggagagcaatgcaaaaggtgatggctacgactggtgggatgggtatgggaccaggtggcccaggaatgattactatcccacccagtatcctaaataatcccaacatcccaaatgagattatccatgcattacaggctggaagacttggaagcacagtatttgtagcaaatctggattataaagttggctggaagaaactgaaggaagtatttagtatggctggtgtggtggtccgagcagacattcttgaagataaagatggaaaaagtcgtggaataggcactgttacttttgaacagtccattgaagctgtgcaagctatatctatgttcaatggccagctgctatttgatagaccaatgcacgtcaagatggatgagagggccttaccaaaaggagatttcttccctcctgagcgtccacaacaacttccccatggccttggtggtattggcatggggttaggaccaggagggcaacccattgatgccaatcacctgaataaaggcatcggaatgggaaacataggtcccgcaggaatgggaatggaaggcataggatttggaataaataaaatgggaggaatggaggggccctttggtggtggtatggaaaacatgggtcgatttggatctgggatgaacatgggcaggataaatgaaatcctaagtaatgcactgaagagaggagagatcattgcaaagcagggaggaggtggaggtggaggaagcgtccctgggatcgagaggatgggtcctggcattgaccgcctcgggggtgccggcatggagcgcatgggcgcgggcctgggccacggcatggatcgcgtgggctccgagatcgagcgcatgggcctggtcatggaccgcatgggctccgtggagcgcatgggctccggcattgagcgcatgggcccgctgggcctcgaccacatggcctccagcattgagcgcatgggccagaccatggagcgcattggctctggcgtggagcgcatgggtgccggcatgggcttcggccttgagcgcatggccgctcccatcgaccgtgtgggccagaccattgagcgcatgggctctggcgtggagcgcatgggccctgccatcgagcgcatgggcctgagcatggagcgcatggtgcccgcaggtatgggagctggcctggagcgcatgggccccgtgatggatcgcatggccaccggcctggagcgcatgggcgccaacaatctggagcggatgggcctggagcgcatgggcgccaacagcctcgagcgcatgggcctggagcgcatgggtgccaacagcctcgagcgcatgggccctgccatgggcccggccctgggcgctggcattgagcgcatgggcctggccatgggtggcggtggcggtgccagctttgaccgtgccatcgagatggagcgtggcaacttcggaggaagcttcgcaggttcctttggtggagctggaggccatgctcctggggtggccaggaaggcctgccagatatttgtgagaaatctgccattcgatttcacatggaagatgctaaaggacaaattcaacgagtgcggccacgtgctgtacgccgacatcaagatggagaatgggaagtccaaggggtgtggcgtggttaagttcgagtcgccagaggtggccgagagagcctgccggatgatgaatggcatgaagctgagtggccgagagattgacgttcgaattgatagaaacgcttaagcagttgccttttttaaacatcgatacgagacctctgaatttgtattttttcttgttaaccattttaatttgttggctggatgtataaagatgtttaaaaaattcagttgctttttggggtaatttgaattacttttttaatgactggggttccatttgactgtttgcattgagattgcaatgtgcgcaattttttttgtagttgtggcatcttgttgacatcgaatatgactttgataataaataccggttcctgaaaacggcaaaaaaaaaa

SEQ ID NO: 110 - protein, 730 aa, Homo sapiens
MAAGVEAAAEVAATEIKMEEESGAPGVPSGNGAPGPKGEGERPAQNEKRKEKNIKRGGNRFEPYANPTKRYRAFITNIPFDVKWQSLKDLVKEKVGEVTYVELLMDAEGKSRGCAVVEFKMEESMKKAAEVLNKHSLSGRPLKVKEDPDGEHARRAMQKVMATTGGMGMGPGGPGMITIPPSILNNPNIPNEIIHALQAGRLGSTVFVANLDYKVGWKKLKEVFSMAGVVVRADILEDKDGKSRGIGTVTFEQSIEAVQAISMFNGQLLFDRPMHVKMDERALPKGDFFPPERPQQLPHGLGGIGMGLGPGGQPIDANHLNKGIGMGNIGPAGMGMEGIGFGINKMGGMEGPFGGGMENMGRFGSGMNMGRINEILSNALKRGEIIAKQGGGGGGGSVPGIERMGPGIDRLGGAGMERMGAGLGHGMDRVGSEIERMGLVMDRMGSVERMGSGIERMGPLGLDHMASSIERMGQTMERIGSGVERMGAGMGFGLERMAAPIDRVGQTIERMGSGVERMGPAIERMGLSMERMVPAGMGAGLERMGPVMDRMATGLERMGANNLERMGLERMGANSLERMGLERMGANSLERMGPAMGPALGAGIERMGLAMGGGGGASFDRAIEMERGNFGGSFAGSFGGAGGHAPGVARKACQIFVRNLPFDFTWKMLKDKFNECGHVLYADIKMENGKSKGCGVVKFESPEVAERACRMMNGMKLSGREIDVRIDRNA

SEQ ID NO: 111 - DNA, 2430 bp, Homo sapiens
tggttgcgtcgggtcacgtgggcgcgcaggcgcagcgcggtgcagcccgttcgctcacacaaagcccagacgcggagaaaatggcggcaggggtcgaagcggcggcggaggtggcggcgacggagatcaaaatggaggaagagagcggcgcgcccggcgtgccgagcggcaacggggctccgggccctaagggtgaaggagaacgacctgctcagaatgagaagaggaaggagaaaaacataaaaagaggaggcaatcgctttgagccatatgccaatccaactaaaagatacagagccttcattacaaacataccttttgatgtgaaatggcagtcacttaaagacctggttaaagaaaaagttggtgaggtaacatacgtggagctcttaatggacgctgaaggaaagtcaaggggatgtgctgttgttgaattcaagatggaagagagcatgaaaaaagctgcggaagtcctaaacaagcatagtctgagcggaagaccactgaaagtcaaagaagatcctgatggtgaacatgccaggagagcaatgcaaaaggctggaagacttggaagcacagtatttgtagcaaatctggattataaagttggctggaagaaactgaaggaagtatttagtatggctggtgtggtggtccgagcagacattcttgaagataaagatggaaaaagtcgtggaataggcactgttacttttgaacagtccattgaagctgtgcaagctatatctatgttcaatggccagctgctatttgatagaccaatgcacgtcaagatggatgagagggccttaccaaaaggagatttcttccctcctgagcgtccacaacaacttccccatggccttggtggtattggcatggggttaggaccaggagggcaacccattgatgccaatcacctgaataaaggcatcggaatgggaaacataggtcccgcaggaatgggaatggaaggcataggatttggaataaataaaatgggaggaatggaggggccctttggtggtggtatggaaaacatgggtcgatttggatctgggatgaacatgggcaggataaatgaaatcctaagtaatgcactgaagagaggagagatcattgcaaagcagggaggaggtggaggtggaggaagcgtccctgggatcgagaggatgggtcctggcattgaccgcctcgggggtgccggcatggagcgcatgggcgcgggcctgggccacggcatggatcgcgtgggctccgagatcgagcgcatgggcctggtcatggaccgcatgggctccgtggagcgcatgggctccggcattgagcgcatgggcccgctgggcctcgaccacatggcctccagcattgagcgcatgggccagaccatggagcgcattggctctggcgtggagcgcatgggtgccggcatgggcttcggccttgagcgcatggccgctcccatcgaccgtgtgggccagaccattgagcgcatgggctctggcgtggagcgcatgggccctgccatcgagcgcatgggcctgagcatggagcgcatggtgcccgcaggtatgggagctggcctggagcgcatgggccccgtgatggatcgcatggccaccggcctggagcgcatgggcgccaacaatctggagcggatgggcctggagcgcatgggcgccaacagcctcgagcgcatgggcctggagcgcatgggtgccaacagcctcgagcgcatgggccctgccatgggcccggccctgggcgctggcattgagcgcatgggcctggccatgggtggcggtggcggtgccagctttgaccgtgccatcgagatggagcgtggcaacttcggaggaagcttcgcaggttcctttggtggagctggaggccatgctcctggggtggccaggaaggcctgccagatatttgtgagaaatctgccattcgatttcacatggaagatgctaaaggacaaattcaacgagtgcggccacgtgctgtacgccgacatcaagatggagaatgggaagtccaaggggtgtggcgtggttaagttcgagtcgccagaggtggccgagagagcctgccggatgatgaatggcatgaagctgagtggccgagagattgacgttcgaattgatagaaacgcttaagcagttgccttttttaaacatcgatacgagacctctgaatttgtattttttcttgttaaccattttaatttgttggctggatgtataaagatgtttaaaaaattcagttgctttttggggtaatttgaattacttttttaatgactggggttccatttgactgtttgcattgagattgcaatgtgcgcaattttttttgtagttgtggcatcttgttgacatcgaatatgactttgataataaataccggttcctgaaaacggcaaaaaaaaaa

SEQ ID NO: 112 - protein, 691 aa, Homo sapiens
MAAGVEAAAEVAATEIKMEEESGAPGVPSGNGAPGPKGEGERPAQNEKRKEKNIKRGGNRFEPYANPTKRYRAFITNIPFDVKWQSLKDLVKEKVGEVTYVELLMDAEGKSRGCAVVEFKMEESMKKAAEVLNKHSLSGRPLKVKEDPDGEHARRAMQKAGRLGSTVFVANLDYKVGWKKLKEVFSMAGVVVRADILEDKDGKSRGIGTVTFEQSIEAVQAISMFNGQLLFDRPMHVKMDERALPKGDFFPPERPQQLPHGLGGIGMGLGPGGQPIDANHLNKGIGMGNIGPAGMGMEGIGFGINKMGGMEGPFGGGMENMGRFGSGMNMGRINEILSNALKRGEIIAKQGGGGGGGSVPGIERMGPGIDRLGGAGMERMGAGLGHGMDRVGSEIERMGLVMDRMGSVERMGSGIERMGPLGLDHMASSIERMGQTMERIGSGVERMGAGMGFGLERMAAPIDRVGQTIERMGSGVERMGPAIERMGLSMERMVPAGMGAGLERMGPVMDRMATGLERMGANNLERMGLERMGANSLERMGLERMGANSLERMGPAMGPALGAGIERMGLAMGGGGGASFDRAIEMERGNFGGSFAGSFGGAGGHAPGVARKACQIFVRNLPFDFTWKMLKDKFNECGHVLYADIKMENGKSKGCGVVKFESPEVAERACRMMNGMKLSGREIDVRIDRNA

SEQ ID NO: 113 - DNA, 1435 bp, Homo sapiens
ggcggggcctgcttctcctcagcttcaggcggctgcgacgagccctcaggcgaacctctcggctttcccgcgcggcgccgcctcttgctgcgcctccgcctcctcctctgctccgccaccggcttcctcctcctgagcagtcagcccgcgcgccggccggctccgttatggcgacccgcagccctggcgtcgtgattagtgatgatgaaccaggttatgaccttgatttattttgcatacctaatcattatgctgaggatttggaaagggtgtttattcctcatggactaattatggacaggactgaacgtcttgctcgagatgtgatgaaggagatgggaggccatcacattgtagccctctgtgtgctcaaggggggctataaattctttgctgacctgctggattacatcaaagcactgaatagaaatagtgatagatccattcctatgactgtagattttatcagactgaagagctattgtaatgaccagtcaacaggggacataaaagtaattggtggagatgatctctcaactttaactggaaagaatgtcttgattgtggaagatataattgacactggcaaaacaatgcagactttgctttccttggtcaggcagtataatccaaagatggtcaaggtcgcaagcttgctggtgaaaaggaccccacgaagtgttggatataagccagactttgttggatttgaaattccagacaagtttgttgtaggatatgcccttgactataatgaatacttcagggatttgaatcatgtttgtgtcattagtgaaactggaaaagcaaaatacaaagcctaagatgagagttcaagttgagtttggaaacatctggagtcctattgacatcgccagtaaaattatcaatgttctagttctgtggccatctgcttagtagagctttttgcatgtatcttctaagaattttatctgttttgtactttagaaatgtcagttgctgcattcctaaactgtttatttgcactatgagcctatagactatcagttccctttgggcggattgttgtttaacttgtaaatgaaaaaattctcttaaaccacagcactattgagtgaaacattgaactcatatctgtaagaaataaagagaagatatattagttttttaattggtattttaatttttatatatgcaggaaagaatagaagtgattgaatattgttaattataccaccgtgtgttagaaaagtaagaagcagtcaattttcacatcaaagacagcatctaagaagttttgttctgtcctggaattattttagtagtgtttcagtaatgttgactgtattttccaacttgttcaaattattaccagtgaatctttgtcagcagttcccttttaaatgcaaatcaataaattcccaaaaatttaaaaaaaaaaaaaaaaaaaaaa

SEQ ID NO: 114 - protein, 218 aa, Homo sapiens
MATRSPGVVISDDEPGYDLDLFCIPNHYAEDLERVFIPHGLIMDRTERLARDVMKEMGGHHIVALCVLKGGYKFFADLLDYIKALNRNSDRSIPMTVDFIRLKSYCNDQSTGDIKVIGGDDLSTLTGKNVLIVEDIIDTGKTMQTLLSLVRQYNPKMVKVASLLVKRTPRSVGYKPDFVGFEIPDKFVVGYALDYNEYFRDLNHVCVISETGKAKYKA

SEQ ID NO: 115 - DNA, 2879 bp, Homo sapiens
gattggtgggttcatgtttcccgtcccccgcccgcgggaagtgggggtgaaaagcggcccgacctgcttgcggtgtagtgggcggaccgcgcggctggaggtgtgaggatccgaacccaggggtggggggtggaggcggctcctgcgatcgaaggggacttgagactcaccggccgcacgccatgagggccctgtgggtgctgggcctctgctgcgtcctgctgaccttcgggtcggtcagagctgacgatgaagttgatgtggatggtacagtagaagaggatctgggtaaaagtagagaaggatcaaggacggatgatgaagtagtacagagagaggaagaagctattcagttggatggattaaatgcatcacaaataagagaacttagagagaagtcggaaaagtttgccttccaagccgaagttaacagaatgatgaaacttatcatcaattcattgtataaaaataaagagattttcctgagagaactgatttcaaatgcttctgatgctttagataagataaggctaatatcactgactgatgaaaatgctctttctggaaatgaggaactaacagtcaaaattaagtgtgataaggagaagaacctgctgcatgtcacagacaccggtgtaggaatgaccagagaagagttggttaaaaaccttggtaccatagccaaatctgggacaagcgagtttttaaacaaaatgactgaagcacaggaagatggccagtcaacttctgaattgattggccagtttggtgtcggtttctattccgccttccttgtagcagataaggttattgtcacttcaaaacacaacaacgatacccagcacatctgggagtctgactccaatgaattttctgtaattgctgacccaagaggaaacactctaggacggggaacgacaattacccttgtcttaaaagaagaagcatctgattaccttgaattggatacaattaaaaatctcgtcaaaaaatattcacagttcataaactttcctatttatgtatggagcagcaagactgaaactgttgaggagcccatggaggaagaagaagcagccaaagaagagaaagaagaatctgatgatgaagctgcagtagaggaagaagaagaagaaaagaaaccaaagactaaaaaagttgaaaaaactgtctgggactgggaacttatgaatgatatcaaaccaatatggcagagaccatcaaaagaagtagaagaagatgaatacaaagctttctacaaatcattttcaaaggaaagtgatgaccccatggcttatattcactttactgctgaaggggaagttaccttcaaatcaattttatttgtacccacatctgctccacgtggtctgtttgacgaatatggatctaaaaagagcgattacattaagctctatgtgcgccgtgtattcatcacagacgacttccatgatatgatgcctaaatacctcaattttgtcaagggtgtggtggactcagatgatctccccttgaatgtttcccgcgagactcttcagcaacataaactgcttaaggtgattaggaagaagcttgttcgtaaaacgctggacatgatcaagaagattgctgatgataaatacaatgatactttttggaaagaatttggtaccaacatcaagcttggtgtgattgaagaccactcgaatcgaacacgtcttgctaaacttcttaggttccagtcttctcatcatccaactgacattactagcctagaccagtatgtggaaagaatgaaggaaaaacaagacaaaatctacttcatggctgggtccagcagaaaagaggctgaatcttctccatttgttgagcgacttctgaaaaagggctatgaagttatttacctcacagaacctgtggatgaatactgtattcaggcccttcccgaatttgatgggaagaggttccagaatgttgccaaggaaggagtgaagttcgatgaaagtgagaaaactaaggagagtcgtgaagcagttgagaaagaatttgagcctctgctgaattggatgaaagataaagcccttaaggacaagattgaaaaggctgtggtgtctcagcgcctgacagaatctccgtgtgctttggtggccagccagtacggatggtctggcaacatggagagaatcatgaaagcacaagcgtaccaaacgggcaaggacatctctacaaattactatgcgagtcagaagaaaacatttgaaattaatcccagacacccgctgatcagagacatgcttcgacgaattaaggaagatgaagatgataaaacagttttggatcttgctgtggttttgtttgaaacagcaacgcttcggtcagggtatcttttaccagacactaaagcatatggagatagaatagaaagaatgcttcgcctcagtttgaacattgaccctgatgcaaaggtggaagaagagcccgaagaagaacctgaagagacagcagaagacacaacagaagacacagagcaagacgaagatgaagaaatggatgtgggaacagatgaagaagaagaaacagcaaaggaatctacagctgaaaaagatgaattgtaaattatactctcaccatttggatcctgtgtggagagggaatgtgaaatttacatcatttctttttgggagagacttgttttggatgccccctaatccccttctcccctgcactgtaaaatgtgggattatgggtcacaggaaaaagtgggttttttagttgaattttttttaacattcctcatgaatgtaaatttgtactatttaactgactattcttgatgtaaaatcttgtcatgtgtataaaaataaaaaagatcccaaatactcaaaaaaaaaaaaaaaaaa

SEQ ID NO: 116 - protein, 803 aa, Homo sapiens
MRALWVLGLCCVLLTFGSVRADDEVDVDGTVEEDLGKSREGSRTDDEVVQREEEAIQLDGLNASQIRELREKSEKFAFQAEVNRMMKLIINSLYKNKEIFLRELISNASDALDKIRLISLTDENALSGNEELTVKIKCDKEKNLLHVTDTGVGMTREELVKNLGTIAKSGTSEFLNKMTEAQEDGQSTSELIGQFGVGFYSAFLVADKVIVTSKHNNDTQHIWESDSNEFSVIADPRGNTLGRGTTITLVLKEEASDYLELDTIKNLVKKYSQFINFPIYVWSSKTETVEEPMEEEEAAKEEKEESDDEAAVEEEEEEKKPKTKKVEKTVWDWELMNDIKPIWQRPSKEVEEDEYKAFYKSFSKESDDPMAYIHFTAEGEVTFKSILFVPTSAPRGLFDEYGSKKSDYIKLYVRRVFITDDFHDMMPKYLNFVKGVVDSDDLPLNVSRETLQQHKLLKVIRKKLVRKTLDMIKKIADDKYNDTFWKEFGTNIKLGVIEDHSNRTRLAKLLRFQSSHHPTDITSLDQYVERMKEKQDKIYFMAGSSRKEAESSPFVERLLKKGYEVIYLTEPVDEYCIQALPEFDGKRFQNVAKEGVKFDESEKTKESREAVEKEFEPLLNWMKDKALKDKIEKAVVSQRLTESPCALVASQYGWSGNMERIMKAQAYQTGKDISTNYYASQKKTFEINPRHPLIRDMLRRIKEDEDDKTVLDLAVVLFETATLRSGYLLPDTKAYGDRIERMLRLSLNIDPDAKVEEEPEEEPEETAEDTTEDTEQDEDEEMDVGTDEEEETAKESTAEKDEL

SEQ ID NO: 117 - DNA, 3680 bp, Homo sapiens
tgagtaaatgccgcagattctggaaagttctgatcagtgcgatacataaggctgaggaagtgggacctccccttttgggtcggtagttcagcgccggcgccggtgtgcgagccgcggcagagtgaggcaggcaacccgaggtgcggagcgacctgcggaggctgagccccgctttctcccagggtttcttatcagccagccgccgctgtccccgggggagtaggaggctcctgacaggccgcggctgtctgtgtgtccttctgagtgtcagaggaacggccagaccccgcgggccggagcagaacgcggccagggcagaaagcggcggcaggagaagcaggcagggggccggaggacgcagaccgagacccgaggcggaggcggaccgcgagccggccatgtcggtggtggggttggacgtgggctcgcagagctgctacatcgcggtagcccgggccgggggcatcgagaccatcgccaatgagttcagcgaccggtgcaccccgtcagtcatatcatttggatcaaaaaatagaacaatcggagttgcagccaaaaatcagcaaatcactcatgcaaacaatacggtgtctaacttcaaaagatttcatggccgagcattcaatgaccccttcattcaaaaggagaaggaaaacttgagttacgatttggttccattgaaaaatggtggagttggaataaaggtaatgtacatgggtgaagaacatctatttagtgtggagcagataacagccatgttgttgactaagctgaaggaaactgctgaaaacagcctcaagaaaccagtaacagattgtgttatttcagtcccctccttctttacagatgctgagaggcgatctgtgttagatgctgcacagattgttggcctaaactgtttaagacttatgaatgacatgacagctgttgctttgaattacggaatttataagcaggatctcccaagcctggatgagaaacctcggatagtggtttttgttgatatgggacattcagcttttcaagtgtctgcttgtgcttttaacaagggaaaattgaaggtactgggaacagcttttgatcctttcttaggaggaaaaaacttcgatgaaaagttagtggaacatttttgtgcagaatttaaaactaagtacaagttggatgcaaaatccaaaatacgagcactcctacgtctgtatcaggaatgtgaaaaactgaaaaagctaatgagctctaacagcacagaccttccactgaatatcgaatgctttatgaatgataaagatgtttccggaaagatgaacaggtcacaatttgaagaactctgtgctgaacttctgcaaaagatagaagtacccctttattcactgttggaacaaactcatctcaaagtagaagatgtgagtgcagttgagattgttggaggcgctacacgaattccagctgtgaaggaaagaattgccaaattctttggaaaagatattagcacaacactcaatgcagatgaagcagtagccagaggatgtgcattacagtgtgcaatactttccccggcatttaaagttagagaattttccgtcacagatgcagttccttttccaatatctctgatctggaaccatgattcagaagatactgaaggtgttcatgaagtctttagtcgaaaccatgctgctcctttctccaaagttctcacctttctgagaagggggccttttgagctagaagctttctattctgatccccaaggagttccatatccagaagcaaaaataggccgctttgtagttcagaatgtttctgcacagaaagatggagaaaaatctagagtaaaagtcaaagtgcgagtcaacacccatggcattttcaccatctctacggcatctatggtggagaaagtcccaactgaggagaatgaaatgtcttctgaagctgacatggagtgtctgaatcagagaccaccagaaaacccagacactgataaaaatgtccagcaagacaacagtgaagctggaacacagccccaggtacaaactgatgctcaacaaacctcacagtctcccccttcacctgaacttacctcagaagaaaacaaaatcccagatgctgacaaagcaaatgaaaaaaaagttgaccagcctccagaagctaaaaagcccaaaataaaggtggtgaatgttgagctgcctattgaagccaacttggtctggcagttagggaaagaccttcttaacatgtatattgagacagagggtaagatgataatgcaagataaattggaaaaagaaaggaatgatgctaaaaatgcagttgaggaatatgtgtatgagttcagagacaagctgtgtggaccatatgaaaaatttatatgtgagcaggatcatcaaaattttttgagactcctcacagaaactgaagactggctgtatgaagaaggagaggaccaagctaaacaagcatatgttgacaagttggaagaattaatgaaaattggcactccagttaaagttcggtttcaggaagctgaagaacggccaaaaatgtttgaagaactaggacagaggctgcagcattatgccaagatagcagctgacttcagaaataaggatgagaaatacaaccatattgatgagtctgaaatgaaaaaagtggagaagtctgttaatgaagtgatggaatggatgaataatgtcatgaatgctcaggctaaaaagagtcttgatcaggatccagttgtacgtgctcaggaaattaaaacaaaaatcaaggaattgaacaacacatgtgaacccgttgtaacacaaccgaaaccaaaaattgaatcacccaaactggaaagaactccaaatggcccaaatattgataaaaaggaagaagatttagaagacaaaaacaattttggtgctgaacctccacatcagaatggtgaatgttaccctaatgagaaaaattctgttaatatggacttggactagataaccttaaattggcctattccttcaattaataaaatatttttgccatagtatgtgactctacataacatactgaaactatttatattttcttttttaaggatatttagaaattttgtgtattatatggaaaaagaaaaaaagcttaagtctgtagtctttatgatcctaaaagggaaaattgccttggtaactttcagattcctgtggaattgtgaattcatactaagctttctgtgcagtctcaccatttgcatcactgaggatgaaactgacttttgtcttttggagaaaaaaaactgtactgcttgttcaagagggctgtgattaaaatctttaagcatttgttcctgccaaggtagttttcttgcattttgctctccattcagcatgtgtgtgggtgtggatgtttataaacaagactaagtctgacttcataagggctttctaaaaccatttctgtccaagagaaaatgactttttgctttgatattaaaaattcaatgagtaaaacaaaagctagtcaaatgtgttagcagcatgcagaacaaaaactttaaactttctctctcactatacagtatattgtcatgtgaaagtgtggaatggaagaaatgtcgatcctgttgtaactgattgtgaacacttttatgagctttaaaataaagttcatcttatggtgtcatttctaaaaaaaaaaaaaaa

SEQ ID NO: 118 - protein, 858 aa, Homo sapiens
MSVVGLDVGSQSCYIAVARAGGIETIANEFSDRCTPSVISFGSKNRTIGVAAKNQQITHANNTVSNFKRFHGRAFNDPFIQKEKENLSYDLVPLKNGGVGIKVMYMGEEHLFSVEQITAMLLTKLKETAENSLKKPVTDCVISVPSFFTDAERRSVLDAAQIVGLNCLRLMNDMTAVALNYGIYKQDLPSLDEKPRIVVFVDMGHSAFQVSACAFNKGKLKVLGTAFDPFLGGKNFDEKLVEHFCAEFKTKYKLDAKSKIRALLRLYQECEKLKKLMSSNSTDLPLNIECFMNDKDVSGKMNRSQFEELCAELLQKIEVPLYSLLEQTHLKVEDVSAVEIVGGATRIPAVKERIAKFFGKDISTTLNADEAVARGCALQCAILSPAFKVREFSVTDAVPFPISLIWNHDSEDTEGVHEVFSRNHAAPFSKVLTFLRRGPFELEAFYSDPQGVPYPEAKIGRFVVQNVSAQKDGEKSRVKVKVRVNTHGIFTISTASMVEKVPTEENEMSSEADMECLNQRPPENPDTDKNVQQDNSEAGTQPQVQTDAQQTSQSPPSPELTSEENKIPDADKANEKKVDQPPEAKKPKIKVVNVELPIEANLVWQLGKDLLNMYIETEGKMIMQDKLEKERNDAKNAVEEYVYEFRDKLCGPYEKFICEQDHQNFLRLLTETEDWLYEEGEDQAKQAYVDKLEELMKIGTPVKVRFQEAEERPKMFEELGQRLQHYAKIAADFRNKDEKYNHIDESEMKKVEKSVNEVMEWMNNVMNAQAKKSLDQDPVVRAQEIKTKIKELNNTCEPVVTQPKPKIESPKLERTPNGPNIDKKEEDLEDKNNFGAEPPHQNGECYPNEKNSVNMDLD

SEQ ID NO: 119 - DNA, 1000 bp, Homo sapiens
gctctagaactagtggatcccccgggctgcaggaattctctaaagaagcccctgggagcacagctcatcaccatggactggacctggaggttcctctttgtggtggcagcagctacaggtgtccagtcccaggtgcagctggtgcagtctggggctgaggtgaagaagcctgggtcctcggtgaaggtctcctgcaaggcttctggaggcaccttcagcagctatgctatcagctgggtgcgacaggcccctggacaagggcttgagtggatgggagggatcatccctatctttggtacagcaaactacgcacagaagttccagggcagagtcacgattaccgcggacgaatccacgagcacagcctacatggagctgagcagcctgagatctgaggacacggccgtgtattactgtgcgaaaaccgggatcctggggccgtatagcagtggctggtacccgaactcggactactactactacggtatggacgtctggggccaagggaccacggtcaccgtctcctcagggagtgcatccgccccaacccttttccccctcgtctcctgtgagaattccccgtcggatacgagcagcgtggccgttggctgcctcgcacaggacttccttcccgactccatcactttctcctggaaatacaagaacaactctgacatcagcagcacccggggcttcccatcagtcctgagagggggcaagtacgcagccacctcacaggtgctgctgccttccaaggacgtcatgcagggcacagacgaacacgtggtgtgcaaagtccagcaccccaacggcaacaaagaaaagaacgtgcctcttccagtgattgctgagctgcctcccaaagtgagcgtcttcgtcccaccccgcgacggcttcttcggcaacccccgcagcaagtccaagctcatctgccaggccacgggtttcagtccccggcagattcaggtgtcctggctgcgcgaggggaagcaggtggggt

SEQ ID NO: 120 - protein, 452 aa, Homo sapiens
GSASAPTLFPLVSCENSPSDTSSVAVGCLAQDFLPDSITLSWKYKNNSDISSTRGFPSVLRGGKYAATSQVLLPSKDVMQGTDEHVVCKVQHPNGNKEKNVPLPVIAELPPKVSVFVPPRDGFFGNPRKSKLICQATGFSPRQIQVSWLREGKQVGSGVTTDQVQAEAKESGPTTYKVTSTLTIKESDWLGQSMFTCRVDHRGLTFQQNASSMCVPDQDTAIRVFAIPPSFASIFLTKSTKLTCLVTDLTTYDSVTISWTRQNGEAVKTHTNISESHPNATFSAVGEASICEDDWNSGERFTCTVTHTDLPSPLKQTISRPKGVALHRPDVYLLPPAREQLNLRESATITCLVTGFSPADVFVQWMQRGQPLSPEKYVTSAPMPEPQAPGRYFAHSILTVSEEEWNTGETYTCVAHEALPNRVTERTVDKSTGKPTLYNVSLVMSDTAGTCY

SEQ ID NO: 121 - DNA, 1000 bp, Homo sapiens
gggagtgcatccgccccaacccttttccccctcgtctcctgtgagaattccccgtcggatacgagcagcgtggccgttggctgcctcgcacaggacttccttcccgactccatcactttctcctggaaatacaagaacaactctgacatcagcagcacccggggcttcccatcagtcctgagagggggcaagtacgcagccacctcacaggtgctgctgccttccaaggacgtcatgcagggcacagacgaacacgtggtgtgcaaagtccagcaccccaacggcaacaaagaaaagaacgtgcctcttccagtgattgctgagctgcctcccaaagtgagcgtcttcgtcccaccccgcgacggcttcttcggcaacccccgcaagtccaagctcatctgccaggccacgggtttcagtccccggcagattcaggtgtcctggctgcgcgaggggaagcaggtggggtctggcgtcaccacggaccaggtgcaggctgaggccaaagagtctgggcccacgacctacaaggtgaccagcacactgaccatcaaagagagcgactggctcggccagagcatgttcacctgccgcgtggatcacaggggcctgaccttccagcagaatgcgtcctccatgtgtgtccccgatcaagacatagccatccgggtcttcgccatccccccatcctttgccagcatcttcctcaccaagtccaccaagttgacctgcctggtcacagacctgaccacctatgacagcgtgaccatctcctggacccgccagaatggcgaagctgtgaaaacccacaccaacatctccgagagccaccccaatgccactttcagcgccgtgggtgaggccagcatctgcgaggatgactggaattccggggagaggttcacgtgcaccgtgacccacacagacctgccctcgccactgaagcagaccatctcccggcccaagggggtggccctgcacaggcccgatgtctacttgc

SEQ ID NO: 122 - protein, 473 aa, Homo sapiens
GSASAPTLFPLVSCENSPSDTSSVAVGCLAQDFLPDSITLSWKYKNNSDISSTRGFPSVLRGGKYAATSQVLLPSKDVMQGTDEHVVCKVQHPNGNKEKNVPLPVIAELPPKVSVFVPPRDGFFGNPRKSKLICQATGFSPRQIQVSWLREGKQVGSGVTTDQVQAEAKESGPTTYKVTSTLTIKESDWLGQSMFTCRVDHRGLTFQQNASSMCVPDQDTAIRVFAIPPSFASIFLTKSTKLTCLVTDLTTYDSVTISWTRQNGEAVKTHTNISESHPNATFSAVGEASICEDDWNSGERFTCTVTHTDLPSPLKQTISRPKGVALHRPDVYLLPPAREQLNLRESATITCLVTGFSPADVFVQWMQRGQPLSPEKYVTSAPMPEPQAPGRYFAHSILTVSEEEWNTGETYTCVAHEALPNRVTERTVDKSTEGEVSADEEGFENLWATASTFIVLFLLSLFYSTTVTLFKVK

SEQ ID NO: 123 - DNA, 320 bp, Homo sapiens
gtcagcccaaggccaaccccactgtcactctgttcccgccctcctctgaggagctccaagccaacaaggccacactagtgtgtctgatcagtgacttctacccgggagctgtgacagtggcctggaaggcagatggcagccccgtcaaggcgggagtggagaccaccaaaccctccaaacagagcaacaacaagtacgcggccagcagctacctgagcctgacgcccgagcagtggaagtcccacagaagctacagctgccaggtcacgcatgaagggagcaccgtggagaagacagtggcccctacagaatgttcatag

SEQ ID NO: 124 - DNA, 315 bp, Homo sapiens
cccaaggccaaccccacggtcactctgttcccgccctcctctgaggagctccaagccaacaaggccacactagtgtgtctgatcagtgacttctacccgggagctgtgacagtggcttggaaggcagatggcagccccgtcaaggcgggagtggagacgaccaaaccctccaaacagagcaacaacaagtacgcggccagcagctacctgagcctgacgcccgagcagtggaagtcccacagaagctacagctgccaggtcacgcatgaagggagcaccgtggagaagacagtggcccctacagaatgttcatag

SEQ ID NO: 125 - protein, 106 aa, Homo sapiens
GQPKANPTVTLFPPSSEELQANKATLVCLISDFYPGAVTVAWKADGSPVKAGVETTKPSKQSNNKYAASSYLSLTPEQWKSHRSYSCQVTHEGSTVEKTVAPTECS

SEQ ID NO: 126 - DNA, 2798 bp, Homo sapiens
cgttgctgtcgctctgcacgcacctatgtggaaactaaagcccagagagaaagtctgacttgccccacagccagtgagtgactgcagcagcaccagaatctggtctgtttcctgtttggctcttctaccactacggcttgggatctcgggcatggtggctttgccaatggtccttgttttgctgctggtcctgagcagaggtgagagtgaattggacgccaagatcccatccacaggggatgccacagaatggcggaatcctcacctgtccatgctggggtcctgccagccagccccctcctgccagaagtgcatcctctcacaccccagctgtgcatggtgcaagcaactgaacttcaccgcgtcgggagaggcggaggcgcggcgctgcgcccgacgagaggagctgctggctcgaggctgcccgctggaggagctggaggagccccgcggccagcaggaggtgctgcaggaccagccgctcagccagggcgcccgcggagagggtgccacccagctggcgccgcagcgggtccgggtcacgctgcggcctggggagccccagcagctccaggtccgcttccttcgtgctgagggatacccggtggacctgtactaccttatggacctgagctactccatgaaggacgacctggaacgcgtgcgccagctcgggcacgctctgctggtccggctgcaggaagtcacccattctgtgcgcattggttttggttcctttgtggacaaaacggtgctgccctttgtgagcacagtaccctccaaactgcgccacccctgccccacccggctggagcgctgccagtcaccattcagctttcaccatgtgctgtccctgacgggggacgcacaagccttcgagcgggaggtggggcgccagagtgtgtccggcaatctggactcgcctgaaggtggcttcgatgccattctgcaggctgcactctgccaggagcagattggctggagaaatgtgtcccggctgctggtgttcacttcagacgacacattccatacagctggggacgggaagttgggcggcattttcatgcccagtgatgggcactgccacttggacagcaatggcctctacagtcgcagcacagagtttgactacccttctgtgggtcaggtagcccaggccctctctgcagcaaatatccagcccatctttgctgtcaccagtgccgcactgcctgtctaccaggagctgagtaaactgattcctaagtctgcagttggggagctgagtgaggactccagcaacgtggtacagctcatcatggatgcttataatagcctgtcttccaccgtgacccttgaacactcttcactccctcctggggtccacatttcttacgaatcccagtgtgagggtcctgagaagagggagggtaaggctgaggatcgaggacagtgcaaccacgtccgaatcaaccagacggtgactttctgggtttctctccaagccacccactgcctcccagagccccatctcctgaggctccgggcccttggcttctcagaggagctgattgtggagttgcacacgctgtgtgactgtaattgcagtgacacccagccccaggctccccactgcagtgatggccagggacacctacaatgtggtgtatgcagctgtgcccctggccgcctaggtcggctctgtgagtgctctgtggcagagctgtcctccccagacctggaatctgggtgccgggctcccaatggcacagggcccctgtgcagtggaaagggtcactgtcaatgtggacgctgcagctgcagtggacagagctctgggcatctgtgcgagtgtgacgatgccagctgtgagcgacatgagggcatcctctgcggaggctttggtcgctgccaatgtggagtatgtcactgtcatgccaaccgcacgggcagagcatgcgaatgcagtggggacatggacagttgcatcagtcccgagggagggctctgcagtgggcatggacgctgcaaatgcaaccgctgccagtgcttggacggctactatggtgctctatgcgaccaatgcccaggctgcaagacaccatgcgagagacaccgggactgtgcagagtgtggggccttcaggactggcccactggccaccaactgcagtacagcttgtgcccataccaatgtgaccctggccttggcccctatcttggatgatggctggtgcaaagagcggaccctggacaaccagctgttcttcttcttggtggaggatgacgccagaggcacggtcgtgctcagagtgagaccccaagaaaagggagcagaccacacgcaggccattgtgctgggctgcgtagggggcatcgtggcagtggggctggggctggtcctggcttaccggctctcggtggaaatctatgaccgccgggaatacagtcgctttgagaaggagcagcaacaactcaactggaagcaggacagtaatcctctctacaaaagtgccatcacgaccaccatcaatcctcgctttcaagaggcagacagtcccactctctgaaggagggagggacacttacccaaggctcttctccttggaggacagtgggaactggagggtgagaggaagggtgggtctgtaagaccttggtaggggactaattcactggcgaggtgcggccaccaccctacttcattttcagagtgacacccaagagggctgcttcccatgcctgcaaccttgcatccatctgggctaccccacccaagtatacaataaagtcttacctcagaaaaaaaaaaaaaaaaaa

SEQ ID NO: 127 - protein, 798 aa, Homo sapiens
MVALPMVLVLLLVLSRGESELDAKIPSTGDATEWRNPHLSMLGSCQPAPSCQKCILSHPSCAWCKQLNFTASGEAEARRCARREELLARGCPLEELEEPRGQQEVLQDQPLSQGARGEGATQLAPQRVRVTLRPGEPQQLQVRFLRAEGYPVDLYYLMDLSYSMKDDLERVRQLGHALLVRLQEVTHSVRIGFGSFVDKTVLPFVSTVPSKLRHPCPTRLERCQSPFSFHHVLSLTGDAQAFEREVGRQSVSGNLDSPEGGFDAILQAALCQEQIGWRNVSRLLVFTSDDTFHTAGDGKLGGIFMPSDGHCHLDSNGLYSRSTEFDYPSVGQVAQALSAANIQPIFAVTSAALPVYQELSKLIPKSAVGELSEDSSNVVQLIMDAYNSLSSTVTLEHSSLPPGVHISYESQCEGPEKREGKAEDRGQCNHVRINQTVTFWVSLQATHCLPEPHLLRLRALGFSEELIVELHTLCDCNCSDTQPQAPHCSDGQGHLQCGVCSCAPGRLGRLCECSVAELSSPDLESGCRAPNGTGPLCSGKGHCQCGRCSCSGQSSGHLCECDDASCERHEGILCGGFGRCQCGVCHCHANRTGRACECSGDMDSCISPEGGLCSGHGRCKCNRCQCLDGYYGALCDQCPGCKTPCERHRDCAECGAFRTGPLATNCSTACAHTNVTLALAPILDDGWCKERTLDNQLFFFLVEDDARGTVVLRVRPQEKGADHTQAIVLGCVGGIVAVGLGLVLAYRLSVEIYDRREYSRFEKEQQQLNWKQDSNPLYKSAITTTINPRFQEADSPTL

SEQ ID NO: 128 - DNA, 3808 bp, Homo sapiens
caggtgatttttggtggggcggggacatgaaaaaaaagttaaaatgtccttataaagacaaaatctttttctttcctggctgatgatttgtcattctagtcacttcctgccttgtgaccacacacccaggcttgacaaagctgttctgcagatcagaaagaaggggttcctggtcatacaccagtactaccaaggacagcttttttcctgcaagatctgttacctaaagcaataaaaaatggccagaggatcagtgtccgatgaggaaatgatggagctcagagaagcttttgccaaagttgatactgatggcaatggatacatcagcttcaatgagttgaatgacttgttcaaggctgcttgcttgcctttgcctgggtatagagtacgagaaattacagaaaacctgatggctacaggtgatctggaccaagatggaaggatcagctttgatgagtttatcaagattttccatggcctaaaaagcacagatgttgccaagacctttagaaaagcaatcaataagaaggaagggatttgtgcaatcggtggtacttcagagcagtctagcgttggcacccaacactcctattcagaggaagaaaagtatgcctttgtcaactggataaacaaagccctggaaaatgatcctgattgtcggcatgtcatcccaatgaacccaaacacgaatgatctctttaatgctgttggagatggcattgtcctttgtaaaatgatcaacctgtcagtgccagacacaattgatgaaagaacaatcaacaaaaagaagctaacccctttcaccattcaggaaaatctgaacttggctctgaactctgcctcagccatcgggtgccatgtggtcaacataggggctgaggacctgaaggaggggaagccttatctggtcctgggacttctgtggcaagtcatcaagattgggttgtttgctgacattgaactcagcagaaatgaagctctgattgctcttttgagagaaggtgagagcctggaggatttgatgaaactctcccctgaagagctcttgctgaggtgggctaattaccacctggaaaatgcaggctgcaacaaaattggcaacttcagtactgacatcaaggactcaaaagcttattaccacctgcttgagcaggtggctccaaaaggagatgaagaaggtgttcctgctgttgttattgacatgtcaggactgcgggagaaggatgacatccagagggcagaatgcatgctgcagcaggcggagaggctgggctgccggcagtttgtcacagccacagatgttgtccgagggaaccccaagttgaacttggcttttattgccaacctctttaacagataccctgccctgcacaaaccagagaaccaggacattgactggggggctcttgaaggtgagacgagagaagagcggacatttaggaactggatgaactccctgggtgttaaccctcgagtcaatcatttgtacagtgacttatcagatgccctggtcatcttccagctctatgaaaagatcaaagttcctgttgactggaacagagtaaacaaaccgccataccccaaactgggaggcaatatgaagaagcttgagaattgtaactacgcggtagaattggggaagaatcaagcgaagttctccctggttggcatcggtggacaagatctcaatgaaggaaaccgcactctcacactggccttgatttggcagctaatgagaaggtatacactgaatatcctcgaagaaattggtggtggccagaaggtcaatgatgacattattgtcaactgggtgaatgaaacattgagggaagcaaagaaaagttcatccatctctagtttcaaggacccgaagattagtacaagtctgcctgttctggacctcatcgatgccatccaaccaggttccattaactatgaccttctgaagacagaaaatctgaatgatgatgagaaactcaacaatgcaaaatatgccatctctatggcccgaaaaattggagcaagagtgtatgccctgccagaagacctggttgaagtgaaccccaaaatggtcatgaccgtgtttgcctgcctcatggggaaaggaatgaagagggtgtgaggcccaatggggctgggtgggaggcggtgcactcactcctgactgcccggcacagatgctccagggatgattcaagccattccaaagttcaacttggtgacactctataagattccaaaaagcacatattagtgcagccaagtagcctctcctgtatttaacaaaaagtgcttcattctttgcaggaggcccaacctcctatatataggtttctattcttgatttatttgcttcttcgaaaatctagaggaaaagaaagaagttattttccaggtacccttctcgcttttgccattagccaaggatagaagctgcagtggtattaattttgatataatctttcaaaccagcttcatgtggcttcccttttctttgttcaagatgagggccaggaggggaaacatcacacctgccctaaaccctgttcctggaggtcagcatttgatctgttgcaagcccctctttctgtcccctcttcctaccctgcctcccttgactttgctcctcacacttttggaaccatgccttccgggggggcccatctcttctggccgtccttgtctctgggccacttggagtgtgtgataaatcagtcaagctgttgaagtctcaggagtctctggtagcctgcagaagtaagcctcatcatcagagcctttcctcaaaactggagtcccaaatgtcatcaggttttgttttttttcagccactaagaacccctctgcttttaactctagaatttgggcttggaccagatctaacatcttgaatactctgccctctagagccttcagccttaatggaaggttggatccaaggagggtgtaatggagcatcaagccactcggcggcagcatggagctataactaagcatcctttagggttctgcctctccaggcatttagccctcacattagatctagttactgtggtatggctaatacctgtcaacatttggaggcaatcctaccttgcttttgcttctagagcttagcatatctgattgttgtcaggccatattatcaatgtttacttttttggtactataaaagctttctgccacccctaaactccaggggggacaatatgtgccaatcaatagcacccctactcacatacacacacacctagccagctgtcaagggcagaatgaatctatgctggataagaaatggtggaactgcgttatgaagagctaatttactggacaaagaattccaaagcaaaaccagaacagtatgaatttgagcaggtctcataggttgagcaatttccccctaaaccaactgaaggctaaaaagcaacaggccattgtgaaccaatgcaagacgccctctatcatggtgaaaagctccatcaatgaggtatcttctttagtggtggtatgtaatggaacttagccatttttcaaagcaattgaaatgcattgctctggatctgttccttggcagtggactcagaaagccaacatgtggctcctcccagcccataaccagtatttttgctgcttctgaatacaaattggttggttttgacttcagattgaacttactgtagcctcagatgatttcccccctccgcctccaggaagaaagaatgttactgccttaataaaaaatgaaaagagaatgatgctcaaaatctttccaaataaaatgttccctataaaaaaaaaaaaaaaaaaa

SEQ ID NO: 129 - protein, 627 aa, Homo sapiens
MARGSVSDEEMMELREAFAKVDTDGNGYISFNELNDLFKAACLPLPGYRVREITENLMATGDLDQDGRISFDEFIKIFHGLKSTDVAKTFRKAINKKEGICAIGGTSEQSSVGTQHSYSEEEKYAFVNWINKALENDPDCRHVIPMNPNTNDLFNAVGDGIVLCKMINLSVPDTIDERTINKKKLTPFTIQENLNLALNSASAIGCHVVNIGAEDLKEGKPYLVLGLLWQVIKIGLFADIELSRNEALIALLREGESLEDLMKLSPEELLLRWANYHLENAGCNKIGNFSTDIKDSKAYYHLLEQVAPKGDEEGVPAVVIDMSGLREKDDIQRAECMLQQAERLGCRQFVTATDVVRGNPKLNLAFIANLFNRYPALHKPENQDIDWGALEGETREERTFRNWMNSLGVNPRVNHLYSDLSDALVIFQLYEKIKVPVDWNRVNKPPYPKLGGNMKKLENCNYAVELGKNQAKFSLVGIGGQDLNEGNRTLTLALIWQLMRRYTLNILEEIGGGQKVNDDIIVNWVNETLREAKKSSSISSFKDPKISTSLPVLDLIDAIQPGSINYDLLKTENLNDDEKLNNAKYAISMARKIGARVYALPEDLVEVNPKMVMTVFACLMGKGMKRV

SEQ ID NO: 130 - DNA, 5462 bp, Homo sapiens
gaaccggtagtccgcggtggcgcggtccgcccctcacctggccagcggcgggcgctgaggggcccaatgggagccgcggcctggccgccccgccccgcgcctccggacgtctgtgccgggacaaggccgccgctggtgccgggtccttgaggagagcgcctcccgtccgaggccagccgcctctgtcagccgtccgcgcgggccgggtctgaagcgccgccgggacggcgaagagccgcggccgccgcggagaaggaggcagcgcaggaggccggagcggccgccgcgcccgagcacatggcgtccatcttactgaggagctgccgcggccgggcgcccgcccgcctcccgccgccgcctcggtacaccgtcccgcggggtagtccaggggatcctgctcatctcagctgtgccagcaccctggggttgaggaactgcctgaatgttccatttggctgctgcactcccatccaccctgtgtacacatcctccagaggcgatcacctcggctgttgggctctgaggcccgagtgccttcgcatagtgtcgagagcgccatggacctctacctctgtgggttttgtggctgtgggacctcagtgccttcctgtgcgtggctggcactcttcgcgccctgttcgcgatgactcggtagtagagaagtccctcaagtccttgaaggacaagaacaagaagctggaggaaggcggcccggtgtacagcccccccgcagaggtggtggtgaagaagtccctggggcagcgggtgctggacgagctgaagcactactaccatggcttccgcctgctatggatcgacaccaagatcgcggcacgcatgctctggcgcatcctcaacggccacagcctgacccgccgggagcgcaggcagtttctccggatctgcgctgacctcttccgcctggtgccgttccttgtgttcgtggtggtgccgttcatggagtttctgctgcctgttgctgtgaagctcttccccaacatgttgccatccacatttgagactcagtcactcaaggaggagaggctgaagaaggagcttcgggtcaagctggagctggccaagttcctccaggacaccatcgaggagatggccttgaagaacaaggcagccaagggcagcgccaccaaagacttctctgtgtttttccagaagatccgggaaacaggggagaggcccagcaatgaggaaatcatgcgtttttccaaattatttgaggatgagctgaccctggacaacctgacacggccgcagctggtggccctgtgcaagctgctggagctacagtccatcggcaccaacaacttcctgcgcttccagcttaccatgcggctgcgctccataaaggcagacgacaagctgattgctgaggaaggggtggacagcctgaatgtcaaggagctgcaggcagcgtgtcgggcacgaggcatgcgggccctgggcgtcacggaagaccgcctgaggggtcagctgaagcagtggctggacctgcacctgcatcaggagatccccacatcgctgctcatcctgtcccgggccatgtacctcccggacaccctctctccagccgaccagctcaagtccacactgcagaccctcccagagattgtggcaaaggaagcacaggtgaaagtggccgaggtggagggcgagcaggtggacaacaaggccaagctggaggccacgctgcaggaggaggcggccatccagcaggagcaccgtgagaaggagctgcagaagcgctcggaggtggcgaaggattttgagcccgaacgtgtggtagctgctccccaaaggccggggaccgagccacagccagaaatgcctgacacagtcctgcagtcagagaccttgaaggacactgccccggtgctggagggcttgaaggaggaagagatcacgaaggaggaaatcgacatcctcagcgatgcctgctctaagctgcaggagcagaagaagtcactcaccaaggagaaggaggagctggagctgctgaaggaggatgtgcaggactacagcgaggacttgcaggagatcaagaaggaactttcaaagactggtgaagaaaagtacgtggaagaatctaaagccagcaagagattgacaaaaagggtgcagcaaatgatcgggcagatcgatggcttgatctcgcagctggagatggaccagcaggctggcaagctggccccggccaacggcatgcccacgggggagaacgtcatcagtgtcgctgagctcatcaacgccatgaagcaagtcaagcacattcccgaaagcaagctcaccagcctggccgcagcactggatgaaaacaaggatggcaaggtcaacatcgacgacctcgtcaaggtgattgagctggtggacaaagaagatgttcacatctccaccagccaggtggctgagattgtagcaacactggaaaaagaggagaaggtggaggagaaggagaaggccaaagagaaggcagagaaggaggtcgcagaggtgaagagctagaaccactggcctgggcacctgtcctcctgctgtgccgtcaccctggcaagggccgtgagggcgattgctttgtggtgattctcagtggctcatctaatattttggctggaataaatcagagacttccataatcaagtaaattttaattttcatcattccacggagattcagtctgtctggaatcccggaacccctccacagaatcgtgtctggatccacactgtggtgtggctgccacggcctcctggctccagaggcagctgggctgggccaaggcaggaaggcgcccccatgtgtgtggcctcagtctcagcatctgactgtgctgccctgtccccagggaagagaatgaggaccacgtggactccgcccacacagagctggctgctgtgcccaccctcaggggcgtcaggagacacagcctggcctcctcagggctgaagatgcctccattcgcctgtggaccttgatttctagatttcagtgtcaatagacctgtcttcctgcacactttcagttggatgtgggtcattgtggagacagaggtgtctgccatctctgtggcctctggagagtgacgtctccctgctgggagtgctggttctcacgtgcggtttcccttgtgtatcggagctctttctcggctttctatttcccccagttctttaagcagtcaattggcacagagtttcccacgggggctgcagtggattcactgtgtcagggatgagcctggcttgggggttggtggggctctgaagcgcatttggggttctttgtagcttctaatgtgaggtttgagtccagtgcgcccacagcagcatgcccttctcaccccttgcagtgttgcaggctcaggcccctgggctccttcagcaagcaggctagtcaatgaggcatgaggatccggcacagggcatcccctggggcttcaagggcaatacccccgtgcttagggtttgccctgtgccctctgggtggggtggcctccccgcactcggcagcatggccaggctggccagggcgtgggcaggtggtgtcctgtggcacctccatcctcctgcccagccggctgtgtcacactcatctttttaaggtcaggttggttcctggcaaaaatgtacctccaggggcctccaagcataggatttggaagacaggaacggcacaggcgtccaggaaagcagctgcactcagacaatgccttctccattacttgaagcttctttctgttcagccattaaagaaacttgacaaaataggaacaggagatatttctcaattgtaaacctttgtgcagggacagttggcttccagaggctttcagctttcagttatttgagaagtttgttttagatccttaactaatatttatgaattctctcaccctgtgtaagtagcctggtgttcgtttgtccaagtgtacttacccttgagaacaagtcttgcagttgccaggtgtgtgcagacgcctctcctgtgagcggcatcgcgggcccagtcagctgccccggctctcatcctcgtcctcactgccttggctgagcactgttgacgtgaacagccactgcaacaggcagcccatcccactgtcccctctgccctggactccgcatggcctccaaaagccagcttgccctccgggtgctgcaggggctttgcaggtggggaaggctctggtgggtgcctttggtggcttccgtgacatcagccgtgctctgatgcaggcttgctccctcgtcattctccctcgtcattctccctcatcgttctgtgtgcatttttctctatgtcctgacctttcttcttgcacctaaaagtggtgtctgggtgcaaatgtaagcagtggtggatccagaaatatgagctttgtgtaataagcttcttaaaacagtcctttcttacacctgcccagggccagaccctcggtcttggcctttttcaggagctaggatatctgcgcctggtgaaaatgaaacgaattcctgatttaggaattcagtgtttcctcctcactccagctaagcactcacttttttttttttttttttttttttttgatacagagtctcgctctgtcacccaggctggagtgcagtggtgcgatctcggctcactgcaagctccacctcccgggttcaagcgattcttctgcctcagcctcctgagtaattgggattacaggcatgcgccaccatgcccagctaatttttttttttttttttgagacagagtcttgctctgtctcccaggctggagtgcaatggcgtgatctcggctcactgccagctccgcttcctgggttcacgccattctcctgcctcagcctcccgagtagccaggactacaagcacccgccaccacacctggctaatttttttgtatttttattagagacagtgttttaccgtgttagccaggatggtctcgatctcctgacttcgtgatctactcacctcggcctcccaaagtgctgggattacgggcaagtttttattagagatggggtttcatcatgttggtcaggctggtcttcaactcctgacctcaggtgatccacccgcctcagcctcccaaagtgctgggattacaggcatgagccaccgcgcccggcctgaactctcagttctaacgcagggattcaggaattgggctttcagactccttctgcagtgtcacagtccagactttttttaaatgaaggacaccccgcagtggctcacagtgggtcccagggctagcaggagcgtgctggggagccggctctgtctttgttcgcagtgggtcccggtgctggcaggagtgtgctggtgagccggctctgtctttgtaaatccttcaggggtcctacggctgactccaccggacagcccgtcctgggccgtgttaagcaccttttgtagaaatcgtatttttattaaaacatcaaatctgtgttcctgtaa

SEQ ID NO: 131 - protein, 739 aa, Homo sapiens
MASILLRSCRGRAPARLPPPPRYTVPRGSPGDPAHLSCASTLGLRNCLNVPFGCCTPIHPVYTSSRGDHLGCWALRPECLRIVSRAPWTSTSVGFVAVGPQCLPVRGWHSSRPVRDDSVVEKSLKSLKDKNKKLEEGGPVYSPPAEVVVKKSLGQRVLDELKHYYHGFRLLWIDTKIAARMLWRILNGHSLTRRERRQFLRICADLFRLVPFLVFVVVPFMEFLLPVAVKLFPNMLPSTFETQSLKEERLKKELRVKLELAKFLQDTIEEMALKNKAAKGSATKDFSVFFQKIRETGERPSNEEIMRFSKLFEDELTLDNLTRPQLVALCKLLELQSIGTNNFLRFQLTMRLRSIKADDKLIAEEGVDSLNVKELQAACRARGMRALGVTEDRLRGQLKQWLDLHLHQEIPTSLLILSRAMYLPDTLSPADQLKSTLQTLPEIVAKEAQVKVAEVEGEQVDNKAKLEATLQEEAAIQQEHREKELQKRSEVAKDFEPERVVAAPQRPGTEPQPEMPDTVLQSETLKDTAPVLEGLKEEEITKEEIDILSDACSKLQEQKKSLTKEKEELELLKEDVQDYSEDLQEIKKELSKTGEEKYVEESKASKRLTKRVQQMIGQIDGLISQLEMDQQAGKLAPANGMPTGENVISVAELINAMKQVKHIPESKLTSLAAALDENKDGKVNIDDLVKVIELVDKEDVHISTSQVAEIVATLEKEEKVEEKEKAKEKAEKEVAEVKS

SEQ ID NO: 132 - DNA, 2031 bp, Homo sapiens
gagaccctctgctcttctgctcccttcctgtgtgctgcctggcaatggggaactctgagggctgcaataccaagaaggagggtgacctgatagctgctcaggctcggctgaaggacctggaggctctgctgaactccaaggaggccgcactgagcactgctctcagtgagaagcgcacgctggagggcgagctgcatgatctgcggggccaggtggccaagcttgaggcagccctaggtgaggccaagaagcaacttcaggatgagatgctgcggcgggtggatgctgagaacaggctgcagaccatgaaggaggaactggacttccagaagaacatctacagtgaggagctgcgtgagaccaagcgccgtcatgagacccgactggtggagattgacaatgggaagcagcgtgagtttgagagccggctggcggatgcgctgcaggaactgcgggcccagcatgaggaccaggtggagcagtataagaaggagctggagaagacttattctgccaagctggacaatgccaggcagtctgctgagaggaacagcaacctggtgggggctgcccacgaggagctgcagcagtcgcgcatccgcatcgacagcctctctgcccagctcagccagctccagaagcagctggcagccaaggaggcgaagcttcgagacctggaggactcactggcccgtgagcgggacaccagccggcggctgctggcggaaaaggagcgggagatggccgagatgcgggcaaggatgcagcagcagctggacgagtaccaggagcttctggacatcaagctggccctggacatggagatccacgcctaccgcaagctcttggagggcgaggaggagaggctacgcctgtcccccagccctacctcgcagcgcagccgtggccgtgcttcctctcactcatcccagacacagggtgggggcagcgtcaccaaaaagcgcaaactggagtccactgagagccgcagcagcttctcacagcacgcacgcactagcgggcgcgtggccgtggaggaggtggatgaggagggcaagtttgtccggctgcgcaacaagtccaatgaggaccagtccatgggcaattggcagatcaagcgccagaatggagatgatcccttgctgacttaccggttcccaccaaagttcaccctgaaggctgggcaggtggtgacgatctgggctgcaggagctggggccacccacagcccccctaccgacctggtgtggaaggcacagaacacctggggctgcgggaacagcctgcgtacggctctcatcaactccactggggaagaagtggccatgcgcaagctggtgcgctcagtgactgtggttgaggacgacgaggatgaggatggagatgacctgctccatcaccaccacggctcccactgcagcagctcgggggaccccgctgagtacaacctgcgctcgcgcaccgtgctgtgcgggacctgcgggcagcctgccgacaaggcatctgccagcggctcaggagcccaggtgggcggacccatctcctctggctcttctgcctccagtgtcacggtcactcgcagctaccgcagtgtggggggcagtgggggtggcagcttcggggacaatctggtcacccgctcctacctcctgggcaactccagcccccgaacccagagcccccagaactgcagcatcatacaagagatgggaatgaggtgggaggtggaagaagggagaagaaaggtgagtttgagctgccttccctagctttagaccctgggtgggctctgtgcagtcactggaggttgaagccaagtggggtgctgggaggagggagagggaggtcactggaaaggggagagcctgctggcacccaccgtggaggaggaaggcaagagggggtggaggggtgtggcagtggttttggcaaacgctaaagagcccttgcctccccatttcccatctgcaccccttctctcctccccaaatcaatacactagttgtttctacccctggcaaaaaaaaaaaa

SEQ ID NO: 133 - protein, 574 aa, Homo sapiens
MGNSEGCNTKKEGDLIAAQARLKDLEALLNSKEAALSTALSEKRTLEGELHDLRGQVAKLEAALGEAKKQLQDEMLRRVDAENRLQTMKEELDFQKNIYSEELRETKRRHETRLVEIDNGKQREFESRLADALQELRAQHEDQVEQYKKELEKTYSAKLDNARQSAERNSNLVGAAHEELQQSRIRIDSLSAQLSQLQKQLAAKEAKLRDLEDSLARERDTSRRLLAEKEREMAEMRARMQQQLDEYQELLDIKLALDMEIHAYRKLLEGEEERLRLSPSPTSQRSRGRASSHSSQTQGGGSVTKKRKLESTESRSSFSQHARTSGRVAVEEVDEEGKFVRLRNKSNEDQSMGNWQIKRQNGDDPLLTYRFPPKFTLKAGQVVTIWAAGAGATHSPPTDLVWKAQNTWGCGNSLRTALINSTGEEVAMRKLVRSVTVVEDDEDEDGDDLLHHHHGSHCSSSGDPAEYNLRSRTVLCGTCGQPADKASASGSGAQVGGPISSGSSASSVTVTRSYRSVGGSGGGSFGDNLVTRSYLLGNSSPRTQSPQNCSIIQEMGMRWEVEEGRRKVSLSCLP

SEQ ID NO: 134 - DNA, 2077 bp, Homo sapiens
aggaggacctattagagcctttgccccggcgtcggtgactcagtgttcgcgggagcgccgcacctacaccagccaacccagatcccgaggtccgacagcgcccggcccagatccccacgcctgccaggagcaagccgagagccagccggccggcgcactccgactccgagcagtctctgtccttcgacccgagccccgcgccctttccgggacccctgccccgcgggcagcgctgccaacctgccggccatggagaccccgtcccagcggcgcgccacccgcagcggggcgcaggccagctccactccgctgtcgcccacccgcatcacccggctgcaggagaaggaggacctgcaggagctcaatgatcgcttggcggtctacatcgaccgtgtgcgctcgctggaaacggagaacgcagggctgcgccttcgcatcaccgagtctgaagaggtggtcagccgcgaggtgtccggcatcaaggccgcctacgaggccgagctcggggatgcccgcaagacccttgactcagtagccaaggagcgcgcccgcctgcagctggagctgagcaaagtgcgtgaggagtttaaggagctgaaagcgcgcaataccaagaaggagggtgacctgatagctgctcaggctcggctgaaggacctggaggctctgctgaactccaaggaggccgcactgagcactgctctcagtgagaagcgcacgctggagggcgagctgcatgatctgcggggccaggtggccaagcttgaggcagccctaggtgaggccaagaagcaacttcaggatgagatgctgcggcgggtggatgctgagaacaggctgcagaccatgaaggaggaactggacttccagaagaacatctacagtgaggagctgcgtgagaccaagcgccgtcatgagacccgactggtggagattgacaatgggaagcagcgtgagtttgagagccggctggcggatgcgctgcaggaactgcgggcccagcatgaggaccaggtggagcagtataagaaggagctggagaagacttattctgccaagctggacaatgccaggcagtctgctgagaggaacagcaacctggtgggggctgcccacgaggagctgcagcagtcgcgcatccgcatcgacagcctctctgcccagctcagccagctccagaagcagctggcagccaaggaggcgaagcttcgagacctggaggactcactggcccgtgagcgggacaccagccggcggctgctggcggaaaaggagcgggagatggccgagatgcgggcaaggatgcagcagcagctggacgagtaccaggagcttctggacatcaagctggccctggacatggagatccacgcctaccgcaagctcttggagggcgaggaggagaggctacgcctgtcccccagccctacctcgcagcgcagccgtggccgtgcttcctctcactcatcccagacacagggtgggggcagcgtcaccaaaaagcgcaaactggagtccactgagagccgcagcagcttctcacagcacgcacgcactagcgggcgcgtggccgtggaggaggtggatgaggagggcaagtttgtccggctgcgcaacaagtccaatgaggaccagtccatgggcaattggcagatcaagcgccagaatggagatgatcccttgctgacttaccggttcccaccaaagttcaccctgaaggctgggcaggtggtgacgatctgggctgcaggagctggggccacccacagcccccctaccgacctggtgtggaaggcacagaacacctggggctgcgggaacagcctgcgtacggctctcatcaactccactggggaagaagtggccatgcgcaagctggtgcgctcagtgactgtggttgaggacgacgaggatgaggatggagatgacctgctccatcaccaccacgtgagtggtagccgccgctgaggccgagcctgcactggggccacccagccaggcctgggggcagcctctccccagcctccccgtgccaaaaatcttttcattaaagaatgttttggaactttaaaaaaaa

SEQ ID NO: 135 - protein, 572 aa, Homo sapiens
METPSQRRATRSGAQASSTPLSPTRITRLQEKEDLQELNDRLAVYIDRVRSLETENAGLRLRITESEEVVSREVSGIKAAYEAELGDARKTLDSVAKERARLQLELSKVREEFKELKARNTKKEGDLIAAQARLKDLEALLNSKEAALSTALSEKRTLEGELHDLRGQVAKLEAALGEAKKQLQDEMLRRVDAENRLQTMKEELDFQKNIYSEELRETKRRHETRLVEIDNGKQREFESRLADALQELRAQHEDQVEQYKKELEKTYSAKLDNARQSAERNSNLVGAAHEELQQSRIRIDSLSAQLSQLQKQLAAKEAKLRDLEDSLARERDTSRRLLAEKEREMAEMRARMQQQLDEYQELLDIKLALDMEIHAYRKLLEGEEERLRLSPSPTSQRSRGRASSHSSQTQGGGSVTKKRKLESTESRSSFSQHARTSGRVAVEEVDEEGKFVRLRNKSNEDQSMGNWQIKRQNGDDPLLTYRFPPKFTLKAGQVVTIWAAGAGATHSPPTDLVWKAQNTWGCGNSLRTALINSTGEEVAMRKLVRSVTVVEDDEDEDGDDLLHHHHVSGSRR

SEQ ID NO: 136 - DNA, 3239 bp, Homo sapiens
aggaggacctattagagcctttgccccggcgtcggtgactcagtgttcgcgggagcgccgcacctacaccagccaacccagatcccgaggtccgacagcgcccggcccagatccccacgcctgccaggagcaagccgagagccagccggccggcgcactccgactccgagcagtctctgtccttcgacccgagccccgcgccctttccgggacccctgccccgcgggcagcgctgccaacctgccggccatggagaccccgtcccagcggcgcgccacccgcagcggggcgcaggccagctccactccgctgtcgcccacccgcatcacccggctgcaggagaaggaggacctgcaggagctcaatgatcgcttggcggtctacatcgaccgtgtgcgctcgctggaaacggagaacgcagggctgcgccttcgcatcaccgagtctgaagaggtggtcagccgcgaggtgtccggcatcaaggccgcctacgaggccgagctcggggatgcccgcaagacccttgactcagtagccaaggagcgcgcccgcctgcagctggagctgagcaaagtgcgtgaggagtttaaggagctgaaagcgcgcaataccaagaaggagggtgacctgatagctgctcaggctcggctgaaggacctggaggctctgctgaactccaaggaggccgcactgagcactgctctcagtgagaagcgcacgctggagggcgagctgcatgatctgcggggccaggtggccaagcttgaggcagccctaggtgaggccaagaagcaacttcaggatgagatgctgcggcgggtggatgctgagaacaggctgcagaccatgaaggaggaactggacttccagaagaacatctacagtgaggagctgcgtgagaccaagcgccgtcatgagacccgactggtggagattgacaatgggaagcagcgtgagtttgagagccggctggcggatgcgctgcaggaactgcgggcccagcatgaggaccaggtggagcagtataagaaggagctggagaagacttattctgccaagctggacaatgccaggcagtctgctgagaggaacagcaacctggtgggggctgcccacgaggagctgcagcagtcgcgcatccgcatcgacagcctctctgcccagctcagccagctccagaagcagctggcagccaaggaggcgaagcttcgagacctggaggactcactggcccgtgagcgggacaccagccggcggctgctggcggaaaaggagcgggagatggccgagatgcgggcaaggatgcagcagcagctggacgagtaccaggagcttctggacatcaagctggccctggacatggagatccacgcctaccgcaagctcttggagggcgaggaggagaggctacgcctgtcccccagccctacctcgcagcgcagccgtggccgtgcttcctctcactcatcccagacacagggtgggggcagcgtcaccaaaaagcgcaaactggagtccactgagagccgcagcagcttctcacagcacgcacgcactagcgggcgcgtggccgtggaggaggtggatgaggagggcaagtttgtccggctgcgcaacaagtccaatgaggaccagtccatgggcaattggcagatcaagcgccagaatggagatgatcccttgctgacttaccggttcccaccaaagttcaccctgaaggctgggcaggtggtgacgatctgggctgcaggagctggggccacccacagcccccctaccgacctggtgtggaaggcacagaacacctggggctgcgggaacagcctgcgtacggctctcatcaactccactggggaagaagtggccatgcgcaagctggtgcgctcagtgactgtggttgaggacgacgaggatgaggatggagatgacctgctccatcaccaccacggctcccactgcagcagctcgggggaccccgctgagtacaacctgcgctcgcgcaccgtgctgtgcgggacctgcgggcagcctgccgacaaggcatctgccagcggctcaggagcccaggtgggcggacccatctcctctggctcttctgcctccagtgtcacggtcactcgcagctaccgcagtgtggggggcagtgggggtggcagcttcggggacaatctggtcacccgctcctacctcctgggcaactccagcccccgaacccagagcccccagaactgcagcatcatgtaatctgggacctgccaggcaggggtgggggtggaggcttcctgcgtcctcctcacctcatgcccaccccctgccctgcacgtcatgggagggggcttgaagccaaagaaaaataaccctttggtttttttcttctgtatttttttttctaagagaagttattttctacagtggttttatactgaaggaaaaacacaagcaaaaaaaaaaaaaagcatctatctcatctatctcaatcctaatttctcctcccttccttttccctgcttccaggaaactccacatctgccttaaaaccaaagagggcttcctctagaagccaagggaaaggggtgcttttatagaggctagcttctgcttttctgccctggctgctgcccccaccccggggaccctgtgacatggtgcctgagaggcaggcatagaggcttctccgccagcctcctctggacggcaggctcactgccaggccagcctccgagagggagagagagagagagaggacagcttgagccgggcccctgggcttggcctgctgtgattccactacacctggctgaggttcctctgcctgccccgcccccagtccccacccctgcccccagccccggggtgagtccattctcccaggtaccagctgcgcttgcttttctgtattttatttagacaagagatgggaatgaggtgggaggtggaagaagggagaagaaaggtgagtttgagctgccttccctagctttagaccctgggtgggctctgtgcagtcactggaggttgaagccaagtggggtgctgggaggagggagagggaggtcactggaaaggggagagcctgctggcacccaccgtggaggaggaaggcaagagggggtggaggggtgtggcagtggttttggcaaacgctaaagagcccttgcctccccatttcccatctgcaccccttctctcctccccaaatcaatacactagttgtttctacccctggcaaaaaaaaaaaa

SEQ ID NO: 137 - protein, 664 aa, Homo sapiens
METPSQRRATRSGAQASSTPLSPTRITRLQEKEDLQELNDRLAVYIDRVRSLETENAGLRLRITESEEVVSREVSGIKAAYEAELGDARKTLDSVAKERARLQLELSKVREEFKELKARNTKKEGDLIAAQARLKDLEALLNSKEAALSTALSEKRTLEGELHDLRGQVAKLEAALGEAKKQLQDEMLRRVDAENRLQTMKEELDFQKNIYSEELRETKRRHETRLVEIDNGKQREFESRLADALQELRAQHEDQVEQYKKELEKTYSAKLDNARQSAERNSNLVGAAHEELQQSRIRIDSLSAQLSQLQKQLAAKEAKLRDLEDSLARERDTSRRLLAEKEREMAEMRARMQQQLDEYQELLDIKLALDMEIHAYRKLLEGEEERLRLSPSPTSQRSRGRASSHSSQTQGGGSVTKKRKLESTESRSSFSQHARTSGRVAVEEVDEEGKFVRLRNKSNEDQSMGNWQIKRQNGDDPLLTYRFPPKFTLKAGQVVTIWAAGAGATHSPPTDLVWKAQNTWGCGNSLRTALINSTGEEVAMRKLVRSVTVVEDDEDEDGDDLLHHHHGSHCSSSGDPAEYNLRSRTVLCGTCGQPADKASASGSGAQVGGPISSGSSASSVTVTRSYRSVGGSGGGSFGDNLVTRSYLLGNSSPRTQSPQNCSIM

SEQ ID NO: 138 - DNA, 3149 bp, Homo sapiens
aggaggacctattagagcctttgccccggcgtcggtgactcagtgttcgcgggagcgccgcacctacaccagccaacccagatcccgaggtccgacagcgcccggcccagatccccacgcctgccaggagcaagccgagagccagccggccggcgcactccgactccgagcagtctctgtccttcgacccgagccccgcgccctttccgggacccctgccccgcgggcagcgctgccaacctgccggccatggagaccccgtcccagcggcgcgccacccgcagcggggcgcaggccagctccactccgctgtcgcccacccgcatcacccggctgcaggagaaggaggacctgcaggagctcaatgatcgcttggcggtctacatcgaccgtgtgcgctcgctggaaacggagaacgcagggctgcgccttcgcatcaccgagtctgaagaggtggtcagccgcgaggtgtccggcatcaaggccgcctacgaggccgagctcggggatgcccgcaagacccttgactcagtagccaaggagcgcgcccgcctgcagctggagctgagcaaagtgcgtgaggagtttaaggagctgaaagcgcgcaataccaagaaggagggtgacctgatagctgctcaggctcggctgaaggacctggaggctctgctgaactccaaggaggccgcactgagcactgctctcagtgagaagcgcacgctggagggcgagctgcatgatctgcggggccaggtggccaagcttgaggcagccctaggtgaggccaagaagcaacttcaggatgagatgctgcggcgggtggatgctgagaacaggctgcagaccatgaaggaggaactggacttccagaagaacatctacagtgaggagctgcgtgagaccaagcgccgtcatgagacccgactggtggagattgacaatgggaagcagcgtgagtttgagagccggctggcggatgcgctgcaggaactgcgggcccagcatgaggaccaggtggagcagtataagaaggagctggagaagacttattctgccaagctggacaatgccaggcagtctgctgagaggaacagcaacctggtgggggctgcccacgaggagctgcagcagtcgcgcatccgcatcgacagcctctctgcccagctcagccagctccagaagcagctggcagccaaggaggcgaagcttcgagacctggaggactcactggcccgtgagcgggacaccagccggcggctgctggcggaaaaggagcgggagatggccgagatgcgggcaaggatgcagcagcagctggacgagtaccaggagcttctggacatcaagctggccctggacatggagatccacgcctaccgcaagctcttggagggcgaggaggagaggctacgcctgtcccccagccctacctcgcagcgcagccgtggccgtgcttcctctcactcatcccagacacagggtgggggcagcgtcaccaaaaagcgcaaactggagtccactgagagccgcagcagcttctcacagcacgcacgcactagcgggcgcgtggccgtggaggaggtggatgaggagggcaagtttgtccggctgcgcaacaagtccaatgaggaccagtccatgggcaattggcagatcaagcgccagaatggagatgatcccttgctgacttaccggttcccaccaaagttcaccctgaaggctgggcaggtggtgacgatctgggctgcaggagctggggccacccacagcccccctaccgacctggtgtggaaggcacagaacacctggggctgcgggaacagcctgcgtacggctctcatcaactccactggggaaggctcccactgcagcagctcgggggaccccgctgagtacaacctgcgctcgcgcaccgtgctgtgcgggacctgcgggcagcctgccgacaaggcatctgccagcggctcaggagcccaggtgggcggacccatctcctctggctcttctgcctccagtgtcacggtcactcgcagctaccgcagtgtggggggcagtgggggtggcagcttcggggacaatctggtcacccgctcctacctcctgggcaactccagcccccgaacccagagcccccagaactgcagcatcatgtaatctgggacctgccaggcaggggtgggggtggaggcttcctgcgtcctcctcacctcatgcccaccccctgccctgcacgtcatgggagggggcttgaagccaaagaaaaataaccctttggtttttttcttctgtatttttttttctaagagaagttattttctacagtggttttatactgaaggaaaaacacaagcaaaaaaaaaaaaaagcatctatctcatctatctcaatcctaatttctcctcccttccttttccctgcttccaggaaactccacatctgccttaaaaccaaagagggcttcctctagaagccaagggaaaggggtgcttttatagaggctagcttctgcttttctgccctggctgctgcccccaccccggggaccctgtgacatggtgcctgagaggcaggcatagaggcttctccgccagcctcctctggacggcaggctcactgccaggccagcctccgagagggagagagagagagagaggacagcttgagccgggcccctgggcttggcctgctgtgattccactacacctggctgaggttcctctgcctgccccgcccccagtccccacccctgcccccagccccggggtgagtccattctcccaggtaccagctgcgcttgcttttctgtattttatttagacaagagatgggaatgaggtgggaggtggaagaagggagaagaaaggtgagtttgagctgccttccctagctttagaccctgggtgggctctgtgcagtcactggaggttgaagccaagtggggtgctgggaggagggagagggaggtcactggaaaggggagagcctgctggcacccaccgtggaggaggaaggcaagagggggtggaggggtgtggcagtggttttggcaaacgctaaagagcccttgcctccccatttcccatctgcaccccttctctcctccccaaatcaatacactagttgtttctacccctggcaaaaaaaaaaaa

SEQ ID NO: 139 - protein, 634 aa, Homo sapiens
METPSQRRATRSGAQASSTPLSPTRITRLQEKEDLQELNDRLAVYIDRVRSLETENAGLRLRITESEEVVSREVSGIKAAYEAELGDARKTLDSVAKERARLQLELSKVREEFKELKARNTKKEGDLIAAQARLKDLEALLNSKEAALSTALSEKRTLEGELHDLRGQVAKLEAALGEAKKQLQDEMLRRVDAENRLQTMKEELDFQKNIYSEELRETKRRHETRLVEIDNGKQREFESRLADALQELRAQHEDQVEQYKKELEKTYSAKLDNARQSAERNSNLVGAAHEELQQSRIRIDSLSAQLSQLQKQLAAKEAKLRDLEDSLARERDTSRRLLAEKEREMAEMRARMQQQLDEYQELLDIKLALDMEIHAYRKLLEGEEERLRLSPSPTSQRSRGRASSHSSQTQGGGSVTKKRKLESTESRSSFSQHARTSGRVAVEEVDEEGKFVRLRNKSNEDQSMGNWQIKRQNGDDPLLTYRFPPKFTLKAGQVVTIWAAGAGATHSPPTDLVWKAQNTWGCGNSLRTALINSTGEGSHCSSSGDPAEYNLRSRTVLCGTCGQPADKASASGSGAQVGGPISSGSSASSVTVTRSYRSVGGSGGGSFGDNLVTRSYLLGNSSPRTQSPQNCSIM

SEQ ID NO: 140 - DNA, 5061 bp, Homo sapiens
ggtctgcagcgcaagcgcagtgcggataaacaggaagcgggcggtggaggcagcagcagagggagagctcggggcttggaggggaaacagcggaagacctaagattatcgggagggcagcagaggcagagaacgaggacaggacccttggccgtcttcttccagggaacgagaggtcacagcctcgctctccgcttaggcttctggcgccccagcttaaagccgaggctgcggctgacaaagggctcgcgccggtgccgccgcccttctcatccgggcattcgggtccctgcggagagggagggggaagggcagagggggaggggaaggagccggaggggcgcacacttggagctgaagccctctccagggctccgggccggtgccccaacggacagaggtcgaggaggacccgcagaggtggcagcggccgggggcaggaggatggtgcagaaggagagtcaagcgacgttggaggagcgggagagcgagctcagctccaaccctgccgcctctgcgggggcatcgctggagccgccggcagctccggcacccggagaagacaaccccgccggggctgggggagcggcggtggccggggctgcaggaggggctcggcggttcctctgcggtgtggtggaaggattttatggaagaccttgggttatggaacagagaaaagaactctttagaaggctccagaaatgggaattaaatacatacttgtatgccccaaaagatgactacaaacataggatgttttggcgagagatgtattcagtggaggaagctgagcaacttatgactctcatctctgctgcacgagaatatgagatagagttcatctatgcgatctcacctggattggatatcactttttctaaccccaaggaagtatccacattgaaacgtaaattggaccaggtttctcagtttgggtgcagatcatttgctttgctttttgatgatatagaccataatatgtgtgcagcagacaaagaggtattcagttcttttgctcatgcccaagtctccatcacaaatgaaatctatcagtacctaggagagccagaaactttcctcttctgtcccacagaatactgtggcactttctgttatccaaatgtgtctcagtctccatatttaaggactgtgggtgaaaagcttctacctggaattgaagtgctttggacaggtcccaaagttgtttctaaagaaattccagtagagtccatcgaagaggtttctaagattattaagagagctccagtaatctgggataacattcatgctaatgattatgatcagaagagactgtttctgggcccgtacaaaggaagatccacagaactcatcccacggttaaaaggagtcctcactaatccaaattgtgaatttgaagccaactacgttgctatccacacccttgccacctggtacaaatcaaacatgaatggagtgagaaaagatgtagtgatgagtaggcaagttgcacacagtggagctaaagcaagtgtagttgatgggactcctttagttgcagcaccctctttaaatgccacaaccgtagtaacaacagtttatcaggagcccattatgagccagggagcagccttgagtggtgagcctactactctgaccaaggaagaagaaaagaaacagcctgatgaagaacccatggacatggtggtggaaaaacaagaagaaacggaccacaagaatgacaatcaaatactgagtgaaattgttgaagcgaaaatggcagaggaattgaaaccaatggacactgataaagagagcatagctgaatcaaaatccccagagatgtccatgcaagaagattgtattagtgacattgcccccatgcaaactgatgaacagacaaacaaggagcagtttgtgccaggtccaaatgaaaagcctttgtacactgcggaaccagtgaccctggaggatttgcagttacttgctgatctattctaccttccttacgagcatggacccaaaggagcacagatgttacgggaatttcaatggcttcgagcaaatagtagtgttgtcagtgtcaattgcaaaggaaaagactctgaaaaaattgaagaatggcggtcacgagcagccaagtttgaagagatgtgtggactagtgatgggaatgttcactcggctctccaattgtgccaacaggacaattctttatgacatgtactcctatgtttgggatatcaagagtataatgtctatggtgaagtcttttgtacagtggttagggtgtcgtagtcattcttcagcacaattcttaattggagaccaagaaccctgggcctttagaggtggtctagcaggagagttccagcgtttgctgccaattgatggggcaaatgatctcttttttcagccacctccactgactcctacctccaaagtttatactatcagaccttattttcctaaggatgaggcatccgtgtacaagatttgcagagaaatgtatgacgatggagtgggtttaccctttcaaagtcagcctgatcttattggagacaagttagtaggagggctgctttccctcagcctggattactgctttgtcctagaagatgaagatggcatatgtggttatgccttgggcactgtagatgtgaccccctttattaaaaaatgtaaaatttcctggatccccttcatgcaggagaagtataccaagccaaatggtgacaaggaactctctgaggctgagaaaataatgttgagtttccatgaagaacaggaagtactgccagaaactttccttgctaatttcccttctctgataaagatggacattcacaaaaaagtaactgacccaagtgtggccaaaagcatgatggcttgcctcctgtcttcactgaaggctaatggctcccggggagctttctgtgaagtgagaccagatgataaaagaattctggaattttacagcaagttaggatgttttgaaattgcaaaaatggaaggatttccaaaggatgtggttatacttggtcggagcctgtgacatttgttgacactgtgaactgtccaaaagtctcttaactgcaccttgtgaatggtagttgaggtcttcatacagttcagcctctagaatggtaacaaatcagccaattggattcgaaacaaagaagactatgtaaaactcacccatcacactttgagactactcactggttggaagaatatagtattgcagcaaatcctgtatgaaagagagatgtgggcttcctttttgagtcttgtgttaggtgctgagaccttttacatgggcttatacagggagagagtcttcaataaatgtagtcagcactattttctgcatccagtgtggttgcgtttctcacctgagagtaatcaagataacatctgtcatcttccttggtttattgagtgaaatgcctctcagtcttaggggacatggcagagatgaaagaaagaaagagtgggtttcagaagtgtcagggtggagtgattccaagtgggatggttgtggcattagtttaagctgaataaataatttcaatttggggcagttattctgctttttgtaaagccgtggccaattgtctcctgtaatgactgttggttcaggcatgttgtactttgtagggacaaatgtgcatttgtttgtggcaaaagcctacaattgacaaacttgtaaatttctttgtatataaactagctgtaacctgactatcctttgtgtttactgtttttgtaaatttttttcctctataaatgaaagggtgttggttcagaatggcactttgaataatgtaaaccagtgaaaagtggattttctttacttttgtctttgggtttggggttgtttttgttctttttgaagttttattatttttaaagtgcctcccacctaggcgtaggccatgaccatttggggtacgagagcctaattttgtaggacttaatctgttgaaaagtgcagttacttctggaaattaacctcaatattaggtcagcatgtgaaatgttggatttgacatgtcaggtagggttcagggactgattggtcccatttgccctcaggtcagttgtttaatctcaagacctgttactactgattttattaaatcagagtctttaattcttgcatgtttgtatctaatttctgaacgaatgagcacactttaaccagttatttacagttacctttttcctttaaccggattgtgaaagcttcatgtattttaatttagattctgtgtttttaagggttctgagcatgaagctggcagatagtcggcaggactcattttttcatcatggctggctgatttctccatagattgataacagtattttgttatcttgcttctctgtagttttgcatcagctgtttaactttgagctgagtgaggggagaggggtaaagagaaagaaacttaagttttctttcacagaactccaccattgtgggctttgagagagccctaaagcattgtacctagtggtacctagtgacttccaaccaaagcctttgagtatgcactaaataggtgagaagaaaggagagaaggtttttaggttagaaacctttaaccgatagaaggatatggtatgttgtaaagctggaaccaagtttgcatttttgagggcttgagatgaagggaagactcttaccagatagtaagacagctgagttttcctcagttttctcgtcttaacactagtggacaattctagcattttgtttggaggatttcagagttaacctcatggaattcaggattttttagcaagtttgcttttggttttatcttggcttttagtaatcatgttggctggtctggtcacaggtgactgtgaaacagatgccctggtcttgctttcatcactctaggatcatgaagtgctatgctatttcctggttatgaatattaaggttggaattacatttttattgattgtttggatcagagctcagttcctgtagaaaacgaactgtaaaagaccatgcaagaggcaaaataaaacttgaagtgaatgcttgtaaaaaaaaaaaaaaaaaa

SEQ ID NO: 141 - protein, 863 aa, Homo sapiens
MVQKESQATLEERESELSSNPAASAGASLEPPAAPAPGEDNPAGAGGAAVAGAAGGARRFLCGVVEGFYGRPWVMEQRKELFRRLQKWELNTYLYAPKDDYKHRMFWREMYSVEEAEQLMTLISAAREYEIEFIYAISPGLDITFSNPKEVSTLKRKLDQVSQFGCRSFALLFDDIDHNMCAADKEVFSSFAHAQVSITNEIYQYLGEPETFLFCPTEYCGTFCYPNVSQSPYLRTVGEKLLPGIEVLWTGPKVVSKEIPVESIEEVSKIIKRAPVIWDNIHANDYDQKRLFLGPYKGRSTELIPRLKGVLTNPNCEFEANYVAIHTLATWYKSNMNGVRKDVVMSRQVAHSGAKASVVDGTPLVAAPSLNATTVVTTVYQEPIMSQGAALSGEPTTLTKEEEKKQPDEEPMDMVVEKQEETDHKNDNQILSEIVEAKMAEELKPMDTDKESIAESKSPEMSMQEDCISDIAPMQTDEQTNKEQFVPGPNEKPLYTAEPVTLEDLQLLADLFYLPYEHGPKGAQMLREFQWLRANSSVVSVNCKGKDSEKIEEWRSRAAKFEEMCGLVMGMFTRLSNCANRTILYDMYSYVWDIKSIMSMVKSFVQWLGCRSHSSAQFLIGDQEPWAFRGGLAGEFQRLLPIDGANDLFFQPPPLTPTSKVYTIRPYFPKDEASVYKICREMYDDGVGLPFQSQPDLIGDKLVGGLLSLSLDYCFVLEDEDGICGYALGTVDVTPFIKKCKISWIPFMQEKYTKPNGDKELSEAEKIMLSFHEEQEVLPETFLANFPSLIKMDIHKKVTDPSVAKSMMACLLSSLKANGSRGAFCEVRPDDKRILEFYSKLGCFEIAKMEGFPKDVVILGRSL

SEQ ID NO: 142 - DNA, 5220 bp, Homo sapiens
ggtctgcagcgcaagcgcagtgcggataaacaggaagcgggcggtggaggcagcagcagagggagagctcggggcttggaggggaaacagcggaagacctaagattatcgggagggcagcagaggcagagaacgaggacaggacccttggccgtcttcttccagggaacgagaggtcacagcctcgctctccgcttaggcttctggcgccccagcttaaagccgaggctgcggctgacaaagggctcgcgccggtgccgccgcccttctcatccgggcattcgggtccctgcggagagggagggggaagggcagagggggaggggaaggagccggaggggcgcacacttggagctgaagccctctccagggctccgggccggtgccccaacggacagaggtcgaggaggacccgcagaggtggcagcggccgggggcaggaggatggtgcagaaggagagtcaagcgacgttggaggagcgggagagcgagctcagctccaaccctgccgcctctgcgggggcatcgctggagccgccggcagctccggcacccggagaagacaaccccgccggggctgggggagcggcggtggccggggctgcaggaggggctcggcggttcctctgcggtgtggtggaaggattttatggaagaccttgggttatggaacagagaaaagaactctttagaaggctccagaaatgggaattaaatacatacttgtatgccccaaaagatgactacaaacataggatgttttggcgagagatgtattcagtggaggaagctgagcaacttatgactctcatctctgctgcacgagaatatgagatagagttcatctatgcgatctcacctggattggatatcactttttctaaccccaaggaagtatccacattgaaacgtaaattggaccaggtttctcagtttgggtgcagatcatttgctttgctttttgatgatatagaccataatatgtgtgcagcagacaaagaggtattcagttcttttgctcatgcccaagtctccatcacaaatgaaatctatcagtacctaggagagccagaaactttcctcttctgtcccacagaatactgtggcactttctgttatccaaatgtgtctcagtctccatatttaaggactgtgggtgaaaagcttctacctggaattgaagtgctttggacaggtcccaaagttgtttctaaagaaattccagtagagtccatcgaagaggtttctaagattattaagagagctccagtaatctgggataacattcatgctaatgattatgatcagaagagactgtttctgggcccgtacaaaggaagatccacagaactcatcccacggttaaaaggagtcctcactaatccaaattgtgaatttgaagccaactacgttgctatccacacccttgccacctggtacaaatcaaacatgaatggagtgagaaaagatgtagtgatgactgacagtgaagatagtactgtgtccatccagataaaattagaaaatgaaggcagtgatgaagatattgaaactgatgtactctatagtccacagatggctctaaagctagcattaacagaatggttgcaagagtttggtgtgcctcatcaatacagcagtaggcaagttgcacacagtggagctaaagcaagtgtagttgatgggactcctttagttgcagcaccctctttaaatgccacaaccgtagtaacaacagtttatcaggagcccattatgagccagggagcagccttgagtggtgagcctactactctgaccaaggaagaagaaaagaaacagcctgatgaagaacccatggacatggtggtggaaaaacaagaagaaacggaccacaagaatgacaatcaaatactgagtgaaattgttgaagcgaaaatggcagaggaattgaaaccaatggacactgataaagagagcatagctgaatcaaaatccccagagatgtccatgcaagaagattgtattagtgacattgcccccatgcaaactgatgaacagacaaacaaggagcagtttgtgccaggtccaaatgaaaagcctttgtacactgcggaaccagtgaccctggaggatttgcagttacttgctgatctattctaccttccttacgagcatggacccaaaggagcacagatgttacgggaatttcaatggcttcgagcaaatagtagtgttgtcagtgtcaattgcaaaggaaaagactctgaaaaaattgaagaatggcggtcacgagcagccaagtttgaagagatgtgtggactagtgatgggaatgttcactcggctctccaattgtgccaacaggacaattctttatgacatgtactcctatgtttgggatatcaagagtataatgtctatggtgaagtcttttgtacagtggttagggtgtcgtagtcattcttcagcacaattcttaattggagaccaagaaccctgggcctttagaggtggtctagcaggagagttccagcgtttgctgccaattgatggggcaaatgatctcttttttcagccacctccactgactcctacctccaaagtttatactatcagaccttattttcctaaggatgaggcatccgtgtacaagatttgcagagaaatgtatgacgatggagtgggtttaccctttcaaagtcagcctgatcttattggagacaagttagtaggagggctgctttccctcagcctggattactgctttgtcctagaagatgaagatggcatatgtggttatgccttgggcactgtagatgtgaccccctttattaaaaaatgtaaaatttcctggatccccttcatgcaggagaagtataccaagccaaatggtgacaaggaactctctgaggctgagaaaataatgttgagtttccatgaagaacaggaagtactgccagaaactttccttgctaatttcccttctctgataaagatggacattcacaaaaaagtaactgacccaagtgtggccaaaagcatgatggcttgcctcctgtcttcactgaaggctaatggctcccggggagctttctgtgaagtgagaccagatgataaaagaattctggaattttacagcaagttaggatgttttgaaattgcaaaaatggaaggatttccaaaggatgtggttatacttggtcggagcctgtgacatttgttgacactgtgaactgtccaaaagtctcttaactgcaccttgtgaatggtagttgaggtcttcatacagttcagcctctagaatggtaacaaatcagccaattggattcgaaacaaagaagactatgtaaaactcacccatcacactttgagactactcactggttggaagaatatagtattgcagcaaatcctgtatgaaagagagatgtgggcttcctttttgagtcttgtgttaggtgctgagaccttttacatgggcttatacagggagagagtcttcaataaatgtagtcagcactattttctgcatccagtgtggttgcgtttctcacctgagagtaatcaagataacatctgtcatcttccttggtttattgagtgaaatgcctctcagtcttaggggacatggcagagatgaaagaaagaaagagtgggtttcagaagtgtcagggtggagtgattccaagtgggatggttgtggcattagtttaagctgaataaataatttcaatttggggcagttattctgctttttgtaaagccgtggccaattgtctcctgtaatgactgttggttcaggcatgttgtactttgtagggacaaatgtgcatttgtttgtggcaaaagcctacaattgacaaacttgtaaatttctttgtatataaactagctgtaacctgactatcctttgtgtttactgtttttgtaaatttttttcctctataaatgaaagggtgttggttcagaatggcactttgaataatgtaaaccagtgaaaagtggattttctttacttttgtctttgggtttggggttgtttttgttctttttgaagttttattatttttaaagtgcctcccacctaggcgtaggccatgaccatttggggtacgagagcctaattttgtaggacttaatctgttgaaaagtgcagttacttctggaaattaacctcaatattaggtcagcatgtgaaatgttggatttgacatgtcaggtagggttcagggactgattggtcccatttgccctcaggtcagttgtttaatctcaagacctgttactactgattttattaaatcagagtctttaattcttgcatgtttgtatctaatttctgaacgaatgagcacactttaaccagttatttacagttacctttttcctttaaccggattgtgaaagcttcatgtattttaatttagattctgtgtttttaagggttctgagcatgaagctggcagatagtcggcaggactcattttttcatcatggctggctgatttctccatagattgataacagtattttgttatcttgcttctctgtagttttgcatcagctgtttaactttgagctgagtgaggggagaggggtaaagagaaagaaacttaagttttctttcacagaactccaccattgtgggctttgagagagccctaaagcattgtacctagtggtacctagtgacttccaaccaaagcctttgagtatgcactaaataggtgagaagaaaggagagaaggtttttaggttagaaacctttaaccgatagaaggatatggtatgttgtaaagctggaaccaagtttgcatttttgagggcttgagatgaagggaagactcttaccagatagtaagacagctgagttttcctcagttttctcgtcttaacactagtggacaattctagcattttgtttggaggatttcagagttaacctcatggaattcaggattttttagcaagtttgcttttggttttatcttggcttttagtaatcatgttggctggtctggtcacaggtgactgtgaaacagatgccctggtcttgctttcatcactctaggatcatgaagtgctatgctatttcctggttatgaatattaaggttggaattacatttttattgattgtttggatcagagctcagttcctgtagaaaacgaactgtaaaagaccatgcaagaggcaaaataaaacttgaagtgaatgcttgtaaaaaaaaaaaaaaaaaa

SEQ ID NO: 143 - protein, 916 aa, Homo sapiens
MVQKESQATLEERESELSSNPAASAGASLEPPAAPAPGEDNPAGAGGAAVAGAAGGARRFLCGVVEGFYGRPWVMEQRKELFRRLQKWELNTYLYAPKDDYKHRMFWREMYSVEEAEQLMTLISAAREYEIEFIYAISPGLDITFSNPKEVSTLKRKLDQVSQFGCRSFALLFDDIDHNMCAADKEVFSSFAHAQVSITNEIYQYLGEPETFLFCPTEYCGTFCYPNVSQSPYLRTVGEKLLPGIEVLWTGPKVVSKEIPVESIEEVSKIIKRAPVIWDNIHANDYDQKRLFLGPYKGRSTELIPRLKGVLTNPNCEFEANYVAIHTLATWYKSNMNGVRKDVVMTDSEDSTVSIQIKLENEGSDEDIETDVLYSPQMALKLALTEWLQEFGVPHQYSSRQVAHSGAKASVVDGTPLVAAPSLNATTVVTTVYQEPIMSQGAALSGEPTTLTKEEEKKQPDEEPMDMVVEKQEETDHKNDNQILSEIVEAKMAEELKPMDTDKESIAESKSPEMSMQEDCISDIAPMQTDEQTNKEQFVPGPNEKPLYTAEPVTLEDLQLLADLFYLPYEHGPKGAQMLREFQWLRANSSVVSVNCKGKDSEKIEEWRSRAAKFEEMCGLVMGMFTRLSNCANRTILYDMYSYVWDIKSIMSMVKSFVQWLGCRSHSSAQFLIGDQEPWAFRGGLAGEFQRLLPIDGANDLFFQPPPLTPTSKVYTIRPYFPKDEASVYKICREMYDDGVGLPFQSQPDLIGDKLVGGLLSLSLDYCFVLEDEDGICGYALGTVDVTPFIKKCKISWIPFMQEKYTKPNGDKELSEAEKIMLSFHEEQEVLPETFLANFPSLIKMDIHKKVTDPSVAKSMMACLLSSLKANGSRGAFCEVRPDDKRILEFYSKLGCFEIAKMEGFPKDVVILGRSL

SEQ ID NO: 144 - DNA, 3466 bp, Homo sapiens
aattacggccggattccggagtcctttccagctccctcttcggccgggtttcccgccgaatacaaaggcgcactgtgaactggctctttctttccgccaatcatttccgccagccattcatcaccgattttcttcatcttcccctccctcttccgtcccgcagtccccgacctgttagctctcggttagttaagggactcgggtccttccgaactgcgcatgcgccaccgcgtctgcagggggagaagcgggcaggggcgcaggcgcagtagtgtgatcccctggccagtccctaagcacgtgggttgggttgtcctgcttggctgcggagggagtggaacctcgatattggtggtgtccatcgtgggcagcggactaataaaggccatggcgccagcagaaatcctgaacgggaaggagatctccgcgcaaataagggcgagactgaaaaatcaagtcactcagttgaaggagcaagtacctggtttcacaccacgcctggcaatattacaggttggcaacagagatgattccaatctttatataaatgtgaagctgaaggctgctgaagagattgggatcaaagccactcacattaagttaccaagaacaaccacagaatctgaggtgatgaagtacattacatctttgaatgaagactctactgtacatgggttcttagtgcagctacctttagattcagagaattccattaacactgaagaagtgatcaatgctattgcacccgagaaggatgtggatggattgactagcatcaatgctgggaaacttgctagaggtgacctcaatgactgtttcattccttgtacgcctaagggatgcttggaactcatcaaagagacaggggtgccgattgccggaaggcatgctgtggtggttgggcgcagtaaaatagttggggccccgatgcatgacttgcttctgtggaacaatgccacagtgaccacctgccactccaagactgcccatctggatgaggaggtaaataaaggtgacatcctggtggttgcaactggtcagcctgaaatggttaaaggggagtggatcaaacctggggcaatagtcatcgactgtggaatcaattatgtcccagatgataaaaaaccaaatgggagaaaagttgtgggtgatgtggcatacgacgaggccaaagagagggcgagcttcatcactcctgttcctggcggcgtagggcccatgacagttgcaatgctcatgcagagcacagtagagagtgccaagcgtttcctggagaaatttaagccaggaaagtggatgattcagtataacaaccttaacctcaagacacctgttccaagtgacattgatatatcacgatcttgtaaaccgaagcccattggtaagctggctcgagaaattggtctgctgtctgaagaggtagaattatatggtgaaacaaaggccaaagttctgctgtcagcactagaacgcctgaagcaccggcctgatgggaaatacgtggtggtgactggaataactccaacacccctgggagaagggaaaagcacaactacaatcgggctagtgcaagcccttggtgcccatctctaccagaatgtctttgcgtgtgtgcgacagccttctcagggccccacctttggaataaaaggtggcgctgcaggaggcggctactcccaggtcattcctatggaagagtttaatctccacctcacaggtgacatccatgccatcactgcagctaataacctcgttgctgcggccattgatgctcggatatttcatgaactgacccagacagacaaggctctctttaatcgtttggtgccatcagtaaatggagtgagaaggttctctgacatccaaatccgaaggttaaagagactaggcattgaaaagactgaccctaccacactgacagatgaagagataaacagatttgcaagattggacattgatccagaaaccataacttggcaaagagtgttggataccaatgatagattcctgaggaagatcacgattggacaggctccaacggagaagggtcacacacggacggcccagtttgatatctctgtggccagtgaaattatggctgtcctggctctcaccacttctctagaagacatgagagagagactgggcaaaatggtggtggcatccagtaagaaaggagagcccgtcagtgccgaagatctgggggtgagtggtgcactgacagtgcttatgaaggacgcaatcaagcccaatctcatgcagacactggagggcactccagtgtttgtccatgctggcccgtttgccaacatcgcacatggcaattcctccatcattgcagaccggatcgcactcaagcttgttggcccagaagggtttgtagtgacggaagcaggatttggagcagacattggaatggaaaagttttttaacatcaaatgccggtattccggcctctgcccccacgtggtggtgcttgttgccactgtcagggctctcaagatgcacgggggcggccccacggtcactgctggactgcctcttcccaaggcttacatacaggagaacctggagctggttgaaaaaggcttcagtaacttgaagaaacaaattgaaaatgccagaatgtttggaattccagtagtagtggccgtgaatgcattcaagacggatacagagtctgagctggacctcatcagccgcctttccagagaacatggggcttttgatgccgtgaagtgcactcactgggcagaagggggcaagggtgccttagccctggctcaggccgtccagagagcagcacaagcacccagcagcttccagctcctttatgacctcaagctcccagttgaggataaaatcaggatcattgcacagaagatctatggagcagatgacattgaattacttcccgaagctcaacacaaagctgaagtctacacgaagcagggctttgggaatctccccatctgcatggctaaaacacacttgtctttgtctcacaacccagagcaaaaaggtgtccctacaggcttcattctgcccattcgcgacatccgcgccagcgttggggctggttttctgtaccccttagtaggaacgatgagcacaatgcctggactccccacccggccctgtttttatgatattgatttggaccctgaaacagaacaggtgaatggattattctaaacagatcaccatccatcttcaagaagctactttgaaagtctggccagtgtctattcaggcccactgggagttaggaagtataagtaagccaagagaagtcagcccctgcccagaagatctgaaactaatagtaggagtttccccagaagtcattttcagccttaattctcatcatgtataaattaacataaatcatgcatgtctgtttactttagtgacgttccacagaataaaaggaaacaagtttgccatcaaaaaaaaaaaaaaaaaa

SEQ ID NO: 145 - protein, 935 aa, Homo sapiens [sequence omitted]

SEQ ID NO: 146 - DNA, 3409 bp, Homo sapiens
aaattcgcggtgggggcggagagcgcagggagaagtaagcccagtgcaggatcctgaggcccgtgtttgcaggaccagggccggccttccgattccccattcattccagaagcaccgaaccacgctgtgcccggatcccaagtgcagcggcacccagcgtgggcctggggttgccggttgacccggtcctcagcctggtagcagaggccaggccagtgccacaaggcacctaagtccacctgggcctggagcaggacaggttgcaaaagaaaatatctcgggacccccaaactccttatgctaagggaaacatcgagcctgggaactgagccatcaacgctgccattctttttcccaaacagaaccctgttgtcagaggtacacccagagcaactccacaccgggtgcatgccacagcaactccatcttaaataggagctggtaaaacgaggctgatacctactgggctgcattcccagacggcatagcgaggaggtgctgaagagcgcaggtttggagaatgatcacctggattggaaccatagctctaccaatatggaacccagctccttaggcctcggtcttctcatggagaacatggtgtgataatcctactcctctgggagggtggctgttaagccttggaccgcagttgccggccaggaatcccagtgtcacggtggacacgcctccctcgcgcccttgccgcccacctgctcacccagctcaggggctttggaattctgtggccacactgcgaggagatcggttctgggtcggaggctacaggaagactcccactccctgaaatctggagtgaagaacgccgccatccagccaccattccaaggaggtgcaggagaacagctctgtgataccatttaacttgttgacattacttttatttgaaggaacgtatattagagcttactttgcaaagaaggaagatggttgtttccgaagtggacatcgcaaaagctgatccagctgctgcatcccaccctctattactgaatggagatgctactgtggcccagaaaaatccaggctcggtggctgagaacaacctgtgcagccagtatgaggagaaggtgcgcccctgcatcgacctcattgactccctgcgggctctaggtgtggagcaggacctggccctgccagccatcgccgtcatcggggaccagagctcgggcaagagctccgtgttggaggcactgtcaggagttgcccttcccagaggcagcgggatcgtgaccagatgcccgctggtgctgaaactgaagaaacttgtgaacgaagataagtggagaggcaaggtcagttaccaggactacgagattgagatttcggatgcttcagaggtagaaaaggaaattaataaagcccagaatgccatcgccggggaaggaatgggaatcagtcatgagctaatcaccctggagatcagctcccgagatgtcccggatctgactctaatagaccttcctggcataaccagagtggctgtgggcaatcagcctgctgacattgggtataagatcaagacactcatcaagaagtacatccagaggcaggagacaatcagcctggtggtggtccccagtaatgtggacatcgccaccacagaggctctcagcatggcccaggaggtggaccccgagggagacaggaccatcggaatcttgacgaagcctgatctggtggacaaaggaactgaagacaaggttgtggacgtggtgcggaacctcgtgttccacctgaagaagggttacatgattgtcaagtgccggggccagcaggagatccaggaccagctgagcctgtccgaagccctgcagagagagaagatcttctttgagaaccacccatatttcagggatctgctggaggaaggaaaggccacggttccctgcctggcagaaaaacttaccagcgagctcatcacacatatctgtaaatctctgcccctgttagaaaatcaaatcaaggagactcaccagagaataacagaggagctacaaaagtatggtgtcgacataccggaagacgaaaatgaaaaaatgttcttcctgatagataaagttaatgcctttaatcaggacatcactgctctcatgcaaggagaggaaactgtaggggaggaagacattcggctgtttaccagactccgacacgagttccacaaatggagtacaataattgaaaacaattttcaagaaggccataaaattttgagtagaaaaatccagaaatttgaaaatcagtatcgtggtagagagctgccaggctttgtgaattacaggacatttgagacaatcgtgaaacagcaaatcaaggcactggaagagccggctgtggatatgctacacaccgtgacggatatggtccggcttgctttcacagatgtttcgataaaaaattttgaagagttttttaacctccacagaaccgccaagtccaaaattgaagacattagagcagaacaagagagagaaggtgagaagctgatccgcctccacttccagatggaacagattgtctactgccaggaccaggtatacaggggtgcattgcagaaggtcagagagaaggagctggaagaagaaaagaagaagaaatcctgggattttggggctttccagtccagctcggcaacagactcttccatggaggagatctttcagcacctgatggcctatcaccaggaggccagcaagcgcatctccagccacatccctttgatcatccagttcttcatgctccagacgtacggccagcagcttcagaaggccatgctgcagctcctgcaggacaaggacacctacagctggctcctgaaggagcggagcgacaccagcgacaagcggaagttcctgaaggagcggcttgcacggctgacgcaggctcggcgccggcttgcccagttccccggttaaccacactctgtccagccccgtagacgtgcacgcacactgtctgcccccgttcccgggtagccactggactgacgacttgagtgctcagtagtcagactggatagtccgtctctgcttatccgttagccgtggtgatttagcaggaagctgtgagagcagtttggtttctagcatgaagacagagccccaccctcagatgcacatgagctggcgggattgaaggatgctgtcttcgtactgggaaagggattttcagccctcagaatcgctccaccttgcagctctccccttctctgtattcctagaaactgacacatgctgaacatcacagcttatttcctcatttttataatgtcccttcacaaacccagtgttttaggagcatgagtgccgtgtgtgtgcgtcctgtcggagccctgtctcctctctctgtaataaactcatttctagcagacaaaaaaaaaaaaaaaaaa

SEQ ID NO: 147 - protein, 662 aa, Homo sapiens
MVVSEVDIAKADPAAASHPLLLNGDATVAQKNPGSVAENNLCSQYEEKVRPCIDLIDSLRALGVEQDLALPAIAVIGDQSSGKSSVLEALSGVALPRGSGIVTRCPLVLKLKKLVNEDKWRGKVSYQDYEIEISDASEVEKEINKAQNAIAGEGMGISHELITLEISSRDVPDLTLIDLPGITRVAVGNQPADIGYKIKTLIKKYIQRQETISLVVVPSNVDIATTEALSMAQEVDPEGDRTIGILTKPDLVDKGTEDKVVDVVRNLVFHLKKGYMIVKCRGQQEIQDQLSLSEALQREKIFFENHPYFRDLLEEGKATVPCLAEKLTSELITHICKSLPLLENQIKETHQRITEELQKYGVDIPEDENEKMFFLIDKVNAFNQDITALMQGEETVGEEDIRLFTRLRHEFHKWSTIIENNFQEGHKILSRKIQKFENQYRGRELPGFVNYRTFETIVKQQIKALEEPAVDMLHTVTDMVRLAFTDVSIKNFEEFFNLHRTAKSKIEDIRAEQEREGEKLIRLHFQMEQIVYCQDQVYRGALQKVREKELEEEKKKKSWDFGAFQSSSATDSSMEEIFQHLMAYHQEASKRISSHIPLIIQFFMLQTYGQQLQKAMLQLLQDKDTYSWLLKERSDTSDKRKFLKERLARLTQARRRLAQFPG

SEQ ID NO: 148 - DNA, 2683 bp, Homo sapiens
tttcttcgcggcgcggggcggggctgggcgcggggtgaaagaggcgaagcgagagcggaggccgcactccagcactgcgcagggaccggaattctgtggccacactgcgaggagatcggttctgggtcggaggctacaggaagactcccactccctgaaatctggagtgaagaacgccgccatccagccaccattccaagcttactttgcaaagaaggaagatggttgtttccgaagtggacatcgcaaaagctgatccagctgctgcatcccaccctctattactgaatggagatgctactgtggcccagaaaaatccaggctcggtggctgagaacaacctgtgcagccagtatgaggagaaggtgcgcccctgcatcgacctcattgactccctgcgggctctaggtgtggagcaggacctggccctgccagccatcgccgtcatcggggaccagagctcgggcaagagctccgtgttggaggcactgtcaggagttgcccttcccagaggcagcgggatcgtgaccagatgcccgctggtgctgaaactgaagaaacttgtgaacgaagataagtggagaggcaaggtcagttaccaggactacgagattgagatttcggatgcttcagaggtagaaaaggaaattaataaagcccagaatgccatcgccggggaaggaatgggaatcagtcatgagctaatcaccctggagatcagctcccgagatgtcccggatctgactctaatagaccttcctggcataaccagagtggctgtgggcaatcagcctgctgacattgggtataagatcaagacactcatcaagaagtacatccagaggcaggagacaatcagcctggtggtggtccccagtaatgtggacatcgccaccacagaggctctcagcatggcccaggaggtggaccccgagggagacaggaccatcggaatcttgacgaagcctgatctggtggacaaaggaactgaagacaaggttgtggacgtggtgcggaacctcgtgttccacctgaagaagggttacatgattgtcaagtgccggggccagcaggagatccaggaccagctgagcctgtccgaagccctgcagagagagaagatcttctttgagaaccacccatatttcagggatctgctggaggaaggaaaggccacggttccctgcctggcagaaaaacttaccagcgagctcatcacacatatctgtaaatctctgcccctgttagaaaatcaaatcaaggagactcaccagagaataacagaggagctacaaaagtatggtgtcgacataccggaagacgaaaatgaaaaaatgttcttcctgatagataaagttaatgcctttaatcaggacatcactgctctcatgcaaggagaggaaactgtaggggaggaagacattcggctgtttaccagactccgacacgagttccacaaatggagtacaataattgaaaacaattttcaagaaggccataaaattttgagtagaaaaatccagaaatttgaaaatcagtatcgtggtagagagctgccaggctttgtgaattacaggacatttgagacaatcgtgaaacagcaaatcaaggcactggaagagccggctgtggatatgctacacaccgtgacggatatggtccggcttgctttcacagatgtttcgataaaaaattttgaagagttttttaacctccacagaaccgccaagtccaaaattgaagacattagagcagaacaagagagagaaggtgagaagctgatccgcctccacttccagatggaacagattgtctactgccaggaccaggtatacaggggtgcattgcagaaggtcagagagaaggagctggaagaagaaaagaagaagaaatcctgggattttggggctttccagtccagctcggcaacagactcttccatggaggagatctttcagcacctgatggcctatcaccaggaggccagcaagcgcatctccagccacatccctttgatcatccagttcttcatgctccagacgtacggccagcagcttcagaaggccatgctgcagctcctgcaggacaaggacacctacagctggctcctgaaggagcggagcgacaccagcgacaagcggaagttcctgaaggagcggcttgcacggctgacgcaggctcggcgccggcttgcccagttccccggttaaccacactctgtccagccccgtagacgtgcacgcacactgtctgcccccgttcccgggtagccactggactgacgacttgagtgctcagtagtcagactggatagtccgtctctgcttatccgttagccgtggtgatttagcaggaagctgtgagagcagtttggtttctagcatgaagacagagccccaccctcagatgcacatgagctggcgggattgaaggatgctgtcttcgtactgggaaagggattttcagccctcagaatcgctccaccttgcagctctccccttctctgtattcctagaaactgacacatgctgaacatcacagcttatttcctcatttttataatgtcccttcacaaacccagtgttttaggagcatgagtgccgtgtgtgtgcgtcctgtcggagccctgtctcctctctctgtaataaactcatttctagcagacaaaaaaaaaaaaaaaaaa

SEQ ID NO: 149 - protein, 662 aa, Homo sapiens; identical to SEQ ID NO: 147

SEQ ID NO: 150 - DNA, 2983 bp, Homo sapiens
gttcgggcccgagaacctgcgtctcccgcgagttcccgcgaggcaagtgctgcaggtgcggggccaggagctaggtttcgtttctgcgcccggagccgccctcagcacagggtctgtgagtttcatttcttcgcggcgcggggcggggctgggcgcggggtgaaagaggcgaagcgagagcggaggccgcactccagcactgcgcagggaccgccttggaccgcagttgccggccaggaatcccagtgtcacggtggacacgcctccctcgcgcccttgccgcccacctgctcacccagctcaggggctttggaattctgtggccacactgcgaggagatcggttctgggtcggaggctacaggaagactcccactccctgaaatctggagtgaagaacgccgccatccagccaccattccaaggaggtgcaggagaacagctctgtgataccatttaacttgttgacattacttttatttgaaggaacgtatattagagcttactttgcaaagaaggaagatggttgtttccgaagtggacatcgcaaaagctgatccagctgctgcatcccaccctctattactgaatggagatgctactgtggcccagaaaaatccaggctcggtggctgagaacaacctgtgcagccagtatgaggagaaggtgcgcccctgcatcgacctcattgactccctgcgggctctaggtgtggagcaggacctggccctgccagccatcgccgtcatcggggaccagagctcgggcaagagctccgtgttggaggcactgtcaggagttgcccttcccagaggcagcgggatcgtgaccagatgcccgctggtgctgaaactgaagaaacttgtgaacgaagataagtggagaggcaaggtcagttaccaggactacgagattgagatttcggatgcttcagaggtagaaaaggaaattaataaagcccagaatgccatcgccggggaaggaatgggaatcagtcatgagctaatcaccctggagatcagctcccgagatgtcccggatctgactctaatagaccttcctggcataaccagagtggctgtgggcaatcagcctgctgacattgggtataagatcaagacactcatcaagaagtacatccagaggcaggagacaatcagcctggtggtggtccccagtaatgtggacatcgccaccacagaggctctcagcatggcccaggaggtggaccccgagggagacaggaccatcggaatcttgacgaagcctgatctggtggacaaaggaactgaagacaaggttgtggacgtggtgcggaacctcgtgttccacctgaagaagggttacatgattgtcaagtgccggggccagcaggagatccaggaccagctgagcctgtccgaagccctgcagagagagaagatcttctttgagaaccacccatatttcagggatctgctggaggaaggaaaggccacggttccctgcctggcagaaaaacttaccagcgagctcatcacacatatctgtaaatctctgcccctgttagaaaatcaaatcaaggagactcaccagagaataacagaggagctacaaaagtatggtgtcgacataccggaagacgaaaatgaaaaaatgttcttcctgatagataaagttaatgcctttaatcaggacatcactgctctcatgcaaggagaggaaactgtaggggaggaagacattcggctgtttaccagactccgacacgagttccacaaatggagtacaataattgaaaacaattttcaagaaggccataaaattttgagtagaaaaatccagaaatttgaaaatcagtatcgtggtagagagctgccaggctttgtgaattacaggacatttgagacaatcgtgaaacagcaaatcaaggcactggaagagccggctgtggatatgctacacaccgtgacggatatggtccggcttgctttcacagatgtttcgataaaaaattttgaagagttttttaacctccacagaaccgccaagtccaaaattgaagacattagagcagaacaagagagagaaggtgagaagctgatccgcctccacttccagatggaacagattgtctactgccaggaccaggtatacaggggtgcattgcagaaggtcagagagaaggagctggaagaagaaaagaagaagaaatcctgggattttggggctttccagtccagctcggcaacagactcttccatggaggagatctttcagcacctgatggcctatcaccaggaggccagcaagcgcatctccagccacatccctttgatcatccagttcttcatgctccagacgtacggccagcagcttcagaaggccatgctgcagctcctgcaggacaaggacacctacagctggctcctgaaggagcggagcgacaccagcgacaagcggaagttcctgaaggagcggcttgcacggctgacgcaggctcggcgccggcttgcccagttccccggttaaccacactctgtccagccccgtagacgtgcacgcacactgtctgcccccgttcccgggtagccactggactgacgacttgagtgctcagtagtcagactggatagtccgtctctgcttatccgttagccgtggtgatttagcaggaagctgtgagagcagtttggtttctagcatgaagacagagccccaccctcagatgcacatgagctggcgggattgaaggatgctgtcttcgtactgggaaagggattttcagccctcagaatcgctccaccttgcagctctccccttctctgtattcctagaaactgacacatgctgaacatcacagcttatttcctcatttttataatgtcccttcacaaacccagtgttttaggagcatgagtgccgtgtgtgtgcgtcctgtcggagccctgtctcctctctctgtaataaactcatttctagcagacaaaaaaaaaaaaaaaaaa

SEQ ID NO: 151 - protein, 662 aa, Homo sapiens; identical to SEQ ID NO: 147

SEQ ID NO: 152 - DNA, 5083 bp, Homo sapiens
agaagagcgatgggagggggtgacgtggcagtgacaggcgcataaactgaaatgaatggcggaaacagcagccaatcggcgatcagattggccgggcattccgcattctcccgtcctccctgagcgctggaaacttcaggaaagcaccaatgagcttccccaaaagtctgattggcctttatctgaaccaatcaaaggtgggtctggcggacgcgtcccaccccaggctctcactgggcgctgtagaatgacaggcccgagagaaatgccaatatccgcggggtcttcctcaagtgacactcagcggcaccaatcgacgtccttcttcccggcggccgagccctcctccccgcggctggccgggcggggcggggacgctgcgcggcggtggctgatgcggtagccgtgtggggcgctccgggcggcgacggcggctctcgtaggcggttccggtcttgtatctccaggcggcggcggctcatggcggcgacggagctgagaggagtggtggggccaggcccggcagccattgcagcacttggcggcggcggcgccggtcccccagtggtgggaggaggcggcggccgcggagatgcggggccaggctccggggccgcgtcagggacggtggtcgcggcggcggcgggaggcccgggcccgggggccgggggagtggcggcggctggcccggcccctgcgccgccgactgggggctcgggcggctcgggcgctgggggttcgggctcggctcgagagggctggctcttcaaatggaccaattatatcaaaggctaccagcggcgatggttcgtgctgagcaacgggctcctgagctactacagatcaaaggcagaaatgagacatacctgccgtggtaccatcaacctcgccacagccaacatcaccgtggaggactcctgcaacttcatcatttccaatgggggtgctcagacctaccatctgaaagctagttcagaagttgagcggcagcgctgggtgacggccctggaactggccaaggccaaagctgtgaagatgctggcagagtcagatgaatcaggagatgaagagtctgtctcacaaactgacaagactgagctgcagaatacccttcggaccctctctagcaaagtagaggacttgagcacgtgcaatgacttgatagctaagcatggcacagctctgcagcgttctctcagtgagctggagtccctgaagttgcctgctgagagcaatgaaaagatcaaacaggtcaacgaacgagccacactctttaggataacatccaatgccatgatcaacgcctgcagagatttcctcatgttagcccagacccatagtaaaaaatggcaaaagtcactacagtatgaaagagaccagcgtatccgactggaagaaaccctcgagcagctggcgaagcagcataatcacctggagagggccttccgaggagccacggtgctgccggcaaacactcctggcaatgtgggttctggtaaagatcagtgctgctctggcaaaggggacatgagcgatgaagatgatgagaatgaattttttgatgcacctgagatcatcaccatgcctgaaaatttgggccacaaacgtactggcagcaatatcagtggagccagcagtgacatcagccttgatgaacagtacaagcatcagctggaggagaccaaaaaggaaaagagaaccagaataccatacaagccaaactatagcctcaatttatggagcatcatgaagaactgcattggaaaagaactctctaagatccccatgccggtaaactttaatgagcccttgtccatgcttcagcgccttactgaagatctggaataccatgagctgttagaccgagctgcaaaatgtgagaattctctagaacagctctgttatgttgcagctttcaccgtgtcctcctactccactactgtcttccgcaccagtaagccattcaacccactgcttggggagacctttgagctggaccgattagaggagaatgggtaccgatccctctgtgaacaggtgagtcatcatccccctgctgctgcgcaccatgctgagtccaaaaatggctggacattgcgtcaggaaatcaaaatcaccagcaagtttcgaggcaaatacctctccattatgcccctcggtaccattcattgtattttccatgcaactgggcaccactacacttggaagaaagttaccacaactgtacacaacattattgtgggcaagttgtggatagatcagtctggcgaaattgatattgtgaatcacaagacaggagacaagtgtaatcttaaatttgttccttatagctacttctctcgggatgtagcaagaaaggtgacgggggaagtgacagatccatcaggaaaagtccactttgctcttctggggacgtgggatgagaaaatggaatgtttcaaagtacagccagtcattggggaaaatgggggtgatgctcgacagagaggccatgaagcagaggaaagcagggtcatgctgtggaaaaggaatcctttaccgaagaatgcagaaaacatgtactacttctcagagcttgctctgactctcaatgcttgggaaagtggcactgcccccacagacagccggttacgacctgaccagagactgatggaaaatggacgctgggatgaagcaaatgcggagaagcagcgcctggaggaaaaacaaagactttccagaaagaagagagaagcggaagctatgaaagccacagaggatggcacaccatatgatccctataaggcactgtggtttgagcggaagaaggaccctgttaccaaggagttaacccatatttataggggagaatactgggagtgtaaagaaaaacaggactggagctcatgcccggacattttctgaaacggcagtaacaaaaaagaggagcatataatggagaagaggacagaggatgtgtgggaaagctggaagttgtgactctcttaccaagtgctttcctcaagtttgtctctcttgaccaatcattttttccaaatcaatcaccagaaggagacaccagtggtggtgattggctggttgccttagctgattgaaactgaaatcgacataggagatactatgtctgtaagggagaggtttagtggccgaaggttagtgttattccacatccacgaagtcaagtattcttggctcttctttctccctctgcccccatttaagacaatgtcactcaccctccccttgtagtatcctgctcagccaagatctgcctaagattatgattcaggggcattttggtgctgttaaaagcaagagccgaatttagaagttcccttaaaaagaaacacataagacttaccaatggaggcattgtgaatggttgcagtggagcttaggtataacatcatcaagtgtgttcacacgcggggtcggtttaatggagtgtccacgcggagataactgcgatattggaacacctgtgagagagattgttctatagggctggaatattcagagttacattcttggaagtttctgtttttacttgcatcaaacacccctctgttgttctccatcatctttaatagcaactggagaccactttggtcattggtaagggggtgcattctcctcacaaaggggttttatggacttcctcaggcggagagcttctgagaacacaggcaggatggaaaaagactactagccacttttgctttcccaaccccccttaatgccatccttcattgtctttctggcttctcttcttctggcacagtaccattttgggtctgtgccccagtgtggagcaaaacattgcctgtcccattctgatatacttcagaatttgagagcagaagttaatgtggaacaaaagttttcaccatctctcaagccccaaggactggagccacctctggaataatgtgttaaatatctgtatattatatatatgtagagaaaaatctaattttttggtttgatttccttcccattaagaatcttgttttttgatacccttgtctccctgagactctttcttggacacgtgttgatgtggatggcactcctgctctccatcttttatgggcagagagatttcaaaacctgagcaggatcatgtctggcagttactaaacagggactttgtccatggtttgtatcatggggtgcctactgctgtctaaactctgctctcctaattagctgactcttgaaaatgaaatcctaacctctttcctgcctcttttctttctcttttcaggaagagtgtgggtagaaagtccggagggcaacttccaatttaattctgctctgtccggcgcataggctgaattccaaaagaactttcttcctaggatgtggggcttaaagcaccgtcatgtggggtggatcagataattgctcctgtggggccctggcttccttctctgtttgtgcagtatttgtttttgttgtcttgttgagaaatatcccctgtgcaacccacccttggttgaggatcacaaattgaggtgccttccttgtatgctttttgttagtattttttgtttttgttccttaactgctgagcctcagccagcgtgggtcctgggggaaataccattccaaaggaagccatccctatggggaaattggttttactgggtaaattaatacttttatttcttcccctatcccttccttcctagttgtgataaacatgggagaggagtgactttgactgctggggaatttcctcctaagaaccttattcccaaaataagccagggattatgtcaaggcttctttcaaggaggctcataaaagcagtgacctcatccggggctttggatagagtgagaattccccaactaaattggacttctctgctttatccccttctcttccttcaccatctgcactacatttctggctgatcccaatcagattcccgctaatggaagaagtttagaatctttcaggtggaataaagtcacatgaaaacaaaacacaactatatatattttcagtttttttgccttattgatttttttccaaaaaaaaaaaactactaaattaaataattttttaaaagtca

SEQ ID NO: 153 - protein, 807 aa, Homo sapiens
MAATELRGVVGPGPAAIAALGGGGAGPPVVGGGGGRGDAGPGSGAASGTVVAAAAGGPGPGAGGVAAAGPAPAPPTGGSGGSGAGGSGSAREGWLFKWTNYIKGYQRRWFVLSNGLLSYYRSKAEMRHTCRGTINLATANITVEDSCNFIISNGGAQTYHLKASSEVERQRWVTALELAKAKAVKMLAESDESGDEESVSQTDKTELQNTLRTLSSKVEDLSTCNDLIAKHGTALQRSLSELESLKLPAESNEKIKQVNERATLFRITSNAMINACRDFLMLAQTHSKKWQKSLQYERDQRIRLEETLEQLAKQHNHLERAFRGATVLPANTPGNVGSGKDQCCSGKGDMSDEDDENEFFDAPEIITMPENLGHKRTGSNISGASSDISLDEQYKHQLEETKKEKRTRIPYKPNYSLNLWSIMKNCIGKELSKIPMPVNFNEPLSMLQRLTEDLEYHELLDRAAKCENSLEQLCYVAAFTVSSYSTTVFRTSKPFNPLLGETFELDRLEENGYRSLCEQVSHHPPAAAHHAESKNGWTLRQEIKITSKFRGKYLSIMPLGTIHCIFHATGHHYTWKKVTTTVHNIIVGKLWIDQSGEIDIVNHKTGDKCNLKFVPYSYFSRDVARKVTGEVTDPSGKVHFALLGTWDEKMECFKVQPVIGENGGDARQRGHEAEESRVMLWKRNPLPKNAENMYYFSELALTLNAWESGTAPTDSRLRPDQRLMENGRWDEANAEKQRLEEKQRLSRKKREAEAMKATEDGTPYDPYKALWFERKKDPVTKELTHIYRGEYWECKEKQDWSSCPDIF

SEQ ID NO: 154 - DNA, 2596 bp, Homo sapiens
gagcctcgaagtccgccggccaatcgaaggcgggccccagcggcgcgtgcgcgccgcggccagcgcgcgcgggcgggggggcaggcgcgccccggacccaggatttataaaggcgaggccgggaccggcgcgcgctctcgtcgcccccgctgtcccggcggcgccaaccgaagcgccccgcctgatccgtgtccgacatgctgcgccgcgctctgctgtgcctggccgtggccgccctggtgcgcgccgacgcccccgaggaggaggaccacgtcctggtgctgcggaaaagcaacttcgcggaggcgctggcggcccacaagtacctgctggtggagttctatgccccttggtgtggccactgcaaggctctggcccctgagtatgccaaagccgctgggaagctgaaggcagaaggttccgagatcaggttggccaaggtggacgccacggaggagtctgacctggcccagcagtacggcgtgcgcggctatcccaccatcaagttcttcaggaatggagacacggcttcccccaaggaatatacagctggcagagaggctgatgacatcgtgaactggctgaagaagcgcacgggcccggctgccaccaccctgcctgacggcgcagctgcagagtccttggtggagtccagcgaggtggctgtcatcggcttcttcaaggacgtggagtcggactctgccaagcagtttttgcaggcagcagaggccatcgatgacataccatttgggatcacttccaacagtgacgtgttctccaaataccagctcgacaaagatggggttgtcctctttaagaagtttgatgaaggccggaacaactttgaaggggaggtcaccaaggagaacctgctggactttatcaaacacaaccagctgccccttgtcatcgagttcaccgagcagacagccccgaagatttttggaggtgaaatcaagactcacatcctgctgttcttgcccaagagtgtgtctgactatgacggcaaactgagcaacttcaaaacagcagccgagagcttcaagggcaagatcctgttcatcttcatcgacagcgaccacaccgacaaccagcgcatcctcgagttctttggcctgaagaaggaagagtgcccggccgtgcgcctcatcaccctggaggaggagatgaccaagtacaagcccgaatcggaggagctgacggcagagaggatcacagagttctgccaccgcttcctggagggcaaaatcaagccccacctgatgagccaggagctgccggaggactgggacaagcagcctgtcaaggtgcttgttgggaagaactttgaagacgtggcttttgatgagaaaaaaaacgtctttgtggagttctatgccccatggtgtggtcactgcaaacagttggctcccatttgggataaactgggagagacgtacaaggaccatgagaacatcgtcatcgccaagatggactcgactgccaacgaggtggaggccgtcaaagtgcacagcttccccacactcaagttctttcctgccagtgccgacaggacggtcattgattacaacggggaacgcacgctggatggttttaagaaattcctggagagcggtggccaggatggggcaggggatgatgacgatctcgaggacctggaagaagcagaggagccagacatggaggaagacgatgatcagaaagctgtgaaagatgaactgtaatacgcaaagccagacccgggcgctgccgagacccctcgggggctgcacacccagcagcagcgcacgcctccgaagcctgcggcctcgcttgaaggagggcgtcgccggaaacccagggaacctctctgaagtgacacctcacccctacacaccgtccgttcacccccgtctcttccttctgcttttcggtttttggaaagggatccatctccaggcagcccaccctggtggggcttgtttcctgaaaccatgatgtactttttcatacatgagtctgtccagagtgcttgctaccgtgttcggagtctcgctgcctccctcccgcgggaggtttctcctctttttgaaaattccgtctgtgggatttttagacatttttcgacatcagggtatttgttccaccttggccaggcctcctcggagaagcttgtcccccgtgtgggagggacggagccggactggacatggtcactcagtaccgcctgcagtgtcgccatgactgatcatggctcttgcatttttgggtaaatggagacttccggatcctgtcagggtgtcccccatgcctggaagaggagctggtggctgccagccctggggcccggcacaggcctgggccttccccttccctcaagccagggctcctcctcctgtcgtgggctcattgtgaccactggcctctctacagcacggcctgtggcctgttcaaggcagaaccacgacccttgactcccgggtggggaggtggccaaggatgctggagctgaatcagacgctgacagttcttcaggcatttctatttcacaatcgaattgaacacattggccaaataaagttgaaattttaccacctgtaaaaaaaaaaaaaaaaaa

SEQ ID NO: 155 - protein, 508 aa, Homo sapiens
MLRRALLCLAVAALVRADAPEEEDHVLVLRKSNFAEALAAHKYLLVEFYAPWCGHCKALAPEYAKAAGKLKAEGSEIRLAKVDATEESDLAQQYGVRGYPTIKFFRNGDTASPKEYTAGREADDIVNWLKKRTGPAATTLPDGAAAESLVESSEVAVIGFFKDVESDSAKQFLQAAEAIDDIPFGITSNSDVFSKYQLDKDGVVLFKKFDEGRNNFEGEVTKENLLDFIKHNQLPLVIEFTEQTAPKIFGGEIKTHILLFLPKSVSDYDGKLSNFKTAAESFKGKILFIFIDSDHTDNQRILEFFGLKKEECPAVRLITLEEEMTKYKPESEELTAERITEFCHRFLEGKIKPHLMSQELPEDWDKQPVKVLVGKNFEDVAFDEKKNVFVEFYAPWCGHCKQLAPIWDKLGETYKDHENIVIAKMDSTANEVEAVKVHSFPTLKFFPASADRTVIDYNGERTLDGFKKFLESGGQDGAGDDDDLEDLEEAEEPDMEEDDDQKAVKDEL

SEQ ID NO: 156 - DNA, 1355 bp, Homo sapiens
ggatggccggagctggcgccctggttctggaggtaaccggttactgagggcgagaagcgccacccggaggctctagcctgacaaatgcttgctgacctgggccagagctcttcccttacgcaagtctcagccggtcgtcgcgacgttcgcccgctcgctctgaggctcctgaagccgaaaccagctagactttcctccttcccgcctgcctgtagcggcgttgttgccactccgccaccatgttcgaggcgcgcctggtccagggctccatcctcaagaaggtgttggaggcactcaaggacctcatcaacgaggcctgctgggatattagctccagcggtgtaaacctgcagagcatggactcgtcccacgtctctttggtgcagctcaccctgcggtctgagggcttcgacacctaccgctgcgaccgcaacctggccatgggcgtgaacctcaccagtatgtccaaaatactaaaatgcgccggcaatgaagatatcattacactaagggccgaagataacgcggataccttggcgctagtatttgaagcaccaaaccaggagaaagtttcagactatgaaatgaagttgatggatttagatgttgaacaacttggaattccagaacaggagtacagctgtgtagtaaagatgccttctggtgaatttgcacgtatatgccgagatctcagccatattggagatgctgttgtaatttcctgtgcaaaagacggagtgaaattttctgcaagtggagaacttggaaatggaaacattaaattgtcacagacaagtaatgtcgataaagaggaggaagctgttaccatagagatgaatgaaccagttcaactaacttttgcactgaggtacctgaacttctttacaaaagccactccactctcttcaacggtgacactcagtatgtctgcagatgtaccccttgttgtagagtataaaattgcggatatgggacacttaaaatactacttggctcccaagatcgaggatgaagaaggatcttaggcattcttaaaattcaagaaaataaaactaagctctttgagaactgcttctaagatgccagcatatactgaagtcttttctgtcaccaaatttgtacctctaagtacatatgtagatattgttttctgtaaataacctatttttttctctattctctgcaatttgtttaaagaataaagtccaaagtcagatctggtctagttaacctagaagtatttttgtctcttagaaatacttgtgatttttataatacaaaagggtcttgactctaaatgcagttttaagaattgtttttgaatttaaataaagttacttgaatttcaaacatca

SEQ ID NO: 157 - protein, 261 aa, Homo sapiens
MFEARLVQGSILKKVLEALKDLINEACWDISSSGVNLQSMDSSHVSLVQLTLRSEGFDTYRCDRNLAMGVNLTSMSKILKCAGNEDIITLRAEDNADTLALVFEAPNQEKVSDYEMKLMDLDVEQLGIPEQEYSCVVKMPSGEFARICRDLSHIGDAVVISCAKDGVKFSASGELGNGNIKLSQTSNVDKEEEAVTIEMNEPVQLTFALRYLNFFTKATPLSSTVTLSMSADVPLVVEYKIADMGHLKYYLAPKIEDEEGS

SEQ ID NO: 158 - DNA, 1319 bp, Homo sapiens
aacgcggcgcagggtgagagcgcgcgcttgcggacgcggcggcattaaacggttgcaggcgtagcagagtggtcgttgtctttctaggtctcagccggtcgtcgcgacgttcgcccgctcgctctgaggctcctgaagccgaaaccagctagactttcctccttcccgcctgcctgtagcggcgttgttgccactccgccaccatgttcgaggcgcgcctggtccagggctccatcctcaagaaggtgttggaggcactcaaggacctcatcaacgaggcctgctgggatattagctccagcggtgtaaacctgcagagcatggactcgtcccacgtctctttggtgcagctcaccctgcggtctgagggcttcgacacctaccgctgcgaccgcaacctggccatgggcgtgaacctcaccagtatgtccaaaatactaaaatgcgccggcaatgaagatatcattacactaagggccgaagataacgcggataccttggcgctagtatttgaagcaccaaaccaggagaaagtttcagactatgaaatgaagttgatggatttagatgttgaacaacttggaattccagaacaggagtacagctgtgtagtaaagatgccttctggtgaatttgcacgtatatgccgagatctcagccatattggagatgctgttgtaatttcctgtgcaaaagacggagtgaaattttctgcaagtggagaacttggaaatggaaacattaaattgtcacagacaagtaatgtcgataaagaggaggaagctgttaccatagagatgaatgaaccagttcaactaacttttgcactgaggtacctgaacttctttacaaaagccactccactctcttcaacggtgacactcagtatgtctgcagatgtaccccttgttgtagagtataaaattgcggatatgggacacttaaaatactacttggctcccaagatcgaggatgaagaaggatcttaggcattcttaaaattcaagaaaataaaactaagctctttgagaactgcttctaagatgccagcatatactgaagtcttttctgtcaccaaatttgtacctctaagtacatatgtagatattgttttctgtaaataacctatttttttctctattctctgcaatttgtttaaagaataaagtccaaagtcagatctggtctagttaacctagaagtatttttgtctcttagaaatacttgtgatttttataatacaaaagggtcttgactctaaatgcagttttaagaattgtttttgaatttaaataaagttacttgaatttcaaacatca

SEQ ID NO: 159 - protein, 261 aa, Homo sapiens; identical to SEQ ID NO: 157

SEQ ID NO: 160 - DNA, 1086 bp, Homo sapiens
gaaggctgggctgggggaagaggcgtggcggcgctgtgcgcgtgcacaaaagagagctgaggggcgggggcgctgcggcacagctggtttgagcaactgaactggaaacaagatgcaggaccccaacgcagacactgaatggaatgacatcttacgcaaaaagggtatcttaccccccaaggaaagtctgaaagaattggaagaggaggcagaagaggagcagcgcatcctccagcagtcagtggtgaaaacatatgaagatatgactttggaagagctggaggatcatgaagacgagtttaatgaggaggatgaacgtgctattgaaatgtacagacggcggagactggctgagtggaaagcaactaaactgaagaataaattcggagaagttttggagatctcagggaaggattatgttcaagaagttaccaaagctggcgagggcttgtgggtcatcttgcacctttacaaacaaggaattcccctctgtgccctgataaatcagcacctcagtggacttgccaggaagtttcctgatgtcaaatttatcaaagccatttcaacaacctgcatacccaattatcctgataggaatctgcccacgatatttgtttacctggaaggagatatcaaggctcagtttattggtcctctggtgtttggcggcatgaacctgacaagagatgagttggaatggaaactgtctgaatctggagcaattatgacagacctggaggaaaaccctaagaagccgattgaagacgtgttgctgtcctcagtgcggcgctctgtcctcatgaagagggacagcgattccgagggtgactgaggctacagcttctatcacatgccgaactttcttgtgacaaattgtctggattttttaaaaaaggaaaaagcaagaatgaatccttgtggtttttagttttgtataaattatgtttcaaatctttacattttggaaataatcattgctggagattctgttaaatattttggaactctttttttttttaaattatagtatttcctctaaaaaaaattaaaaccagccatttgtatggcaaatgtcaaaaaaaaaaa

SEQ ID NO: 161 - protein, 239 aa, Homo sapiens
MQDPNADTEWNDILRKKGILPPKESLKELEEEAEEEQRILQQSVVKTYEDMTLEELEDHEDEFNEEDERAIEMYRRRRLAEWKATKLKNKFGEVLEISGKDYVQEVTKAGEGLWVILHLYKQGIPLCALINQHLSGLARKFPDVKFIKAISTTCIPNYPDRNLPTIFVYLEGDIKAQFIGPLVFGGMNLTRDELEWKLSESGAIMTDLEENPKKPIEDVLLSSVRRSVLMKRDSDSEGD

SEQ ID NO: 162 - DNA, 2970 bp, Homo sapiens
gttttaaacgcgcagccgagggccgcgcgcaggagtagggagggcctagggcggcggagccgactcgtcgcggccgaggcgcgcgcggtccgtgccggcgtcagtctgggattggccggcccgcgacttcctccgccccctgccaatcgccggggacgacttccgtgggtttttccggctcccccgcgtcgctaaggagcgacgggctgtcggccagaccccgagttctcggtgcgctcagcggccgccgacgctaggaggccgcgctccgcccccgctaccatgaggccccggaaagccttcctgctcctgctgctcttggggctggtgcagctgctggccgtggcgggtgccgagggcccggacgaggattcttctaacagagaaaatgccattgaggatgaagaggaggaggaggaggaagatgatgatgaggaagaagacgacttggaagttaaggaagaaaatggagtcttggtcctaaatgatgcaaactttgataattttgtggctgacaaagacacagtgctgctggagttttatgctccatggtgtggacattgcaagcagtttgctccggaatatgaaaaaattgccaacatattaaaggataaagatcctcccattcctgttgccaagatcgatgcaacctcagcgtctgtgctggccagcaggtttgatgtgagtggctaccccaccatcaagatccttaagaaggggcaggctgtagactacgagggctccagaacccaggaagaaattgttgccaaggtcagagaagtctcccagcccgactggacgcctccaccagaagtcacgcttgtgttgaccaaagagaactttgatgaagttgtgaatgatgcagatatcattctggtggagttttatgccccatggtgtggacactgcaagaaacttgcccccgagtatgagaaggccgccaaggagctcagcaagcgttctcctccaattcccctggcaaaggtcgacgccaccgcagaaacagacctggccaagaggtttgatgtctctggctatcccaccctgaaaattttccgcaaaggaaggccttatgactacaacggcccacgagaaaaatatggaatcgttgattacatgatcgagcagtccgggcctccctccaaggagattctgaccctgaagcaggtccaggagttcctgaaggatggagacgatgtcatcatcatcggggtctttaagggggagagtgacccagcctaccagcaataccaggatgccgctaacaacctgagagaagattacaaatttcaccacactttcagcacagaaatagcaaagttcttgaaagtctcccaggggcagttggttgtaatgcagcctgagaaattccagtccaagtatgagccccggagccacatgatggacgtccagggctccacccaggactcggccatcaaggacttcgtgctgaagtacgccctgcccctggttggccaccgcaaggtgtcaaacgatgctaagcgctacaccaggcgccccctggtggtcgtctactacagtgtggacttcagctttgattacagagctgcaactcagttttggcggagcaaagtcctagaggtggccaaggacttccctgagtacacctttgccattgcggacgaagaggactatgctggggaggtgaaggacctggggctcagcgagagtggggaggatgtcaatgccgccatcctggacgagagtgggaagaagttcgccatggagccagaggagtttgactctgacaccctccgcgagtttgtcactgctttcaaaaaaggaaaactgaagccagtcatcaaatcccagccagtgcccaagaacaacaagggacccgtcaaggtcgtggtgggaaagacctttgactccattgtgatggaccccaagaaggacgtcctcatcgagttctacgcgccatggtgcgggcactgcaagcagctagagcccgtgtacaacagcctggccaagaagtacaagggccaaaagggcctggtcatcgccaagatggacgccactgccaacgacgtccccagcgaccgctataaggtggagggcttccccaccatctacttcgcccccagtggggacaaaaagaacccagttaaatttgagggtggagacagagatctggagcatttgagcaagtttatagaagaacatgccacaaaactgagcaggaccaaggaagagctttgaaggcctgaggtctgcggaaggtgggaggaggcagacgccctgcgtggcccatggtcggggcgtccacgccgaggccggcaacaaacgacagtatctcggattcctttttttttttttttaattttttatactttggtgtttcacttcatgctctgaatactgaataaccatgaatgactgaatagtttagtccagatttttacagaggatacatctatttttatcattatttggggtttgaaaaatttttttttacaccttctaatttctttatttctcaaagcagataattcttctgtgtgaaaatgttttctttttttaatttaaggtttaaaattccttttccaaatcatgttgattttgctctttgctttttcgttgtctgagaaattgttggcgtagatttggcttctggtatgtgtttctgattgcttcctgttgagcacaaagtgagagctgccactgagcagccctgccaggggtgctgtttcaggctgggcatcgccaggcggcctccctgcaaaccaagggctgggggcaaaggggcatgatccagggtcccccagggtgggctcagctccagggagaggccacccacgtggcagccccacctcttgagagcccccagtgccggagcagaaaggaccctggacccagaggcagatactgcggggtggtagaaaaggtagagtaggctgtggcaatggaataaaacacgattaaaaacgttaaaaaaaaaaaaaaaaaaaa

SEQ ID NO: 163 - protein, 645 aa, Homo sapiens
MRPRKAFLLLLLLGLVQLLAVAGAEGPDEDSSNRENAIEDEEEEEEEDDDEEEDDLEVKEENGVLVLNDANFDNFVADKDTVLLEFYAPWCGHCKQFAPEYEKIANILKDKDPPIPVAKIDATSASVLASRFDVSGYPTIKILKKGQAVDYEGSRTQEEIVAKVREVSQPDWTPPPEVTLVLTKENFDEVVNDADIILVEFYAPWCGHCKKLAPEYEKAAKELSKRSPPIPLAKVDATAETDLAKRFDVSGYPTLKIFRKGRPYDYNGPREKYGIVDYMIEQSGPPSKEILTLKQVQEFLKDGDDVIIIGVFKGESDPAYQQYQDAANNLREDYKFHHTFSTEIAKFLKVSQGQLVVMQPEKFQSKYEPRSHMMDVQGSTQDSAIKDFVLKYALPLVGHRKVSNDAKRYTRRPLVVVYYSVDFSFDYRAATQFWRSKVLEVAKDFPEYTFAIADEEDYAGEVKDLGLSESGEDVNAAILDESGKKFAMEPEEFDSDTLREFVTAFKKGKLKPVIKSQPVPKNNKGPVKVVVGKTFDSIVMDPKKDVLIEFYAPWCGHCKQLEPVYNSLAKKYKGQKGLVIAKMDATANDVPSDRYKVEGFPTIYFAPSGDKKNPVKFEGGDRDLEHLSKFIEEHATKLSRTKEEL

SEQ ID NO: 164 - DNA, 2474 bp, Homo sapiens
gacatcaccggccagccgggtggagtgagcggcgctgggctcgggctccggctccgcgggcggaagaggcggcggcggcggcagaagcggcggcggcggcggcgggagccgaggaggaggttccggacgctgcttaggaaccggggactcaggagtgcccgcgccctgagcgctcagctccagaggcgtcatggctgagtacgggaccctcctgcaagacctgaccaacaacatcacccttgaagatctagaacagctcaagtcggcctgcaaggaagacatccccagcgaaaagagtgaggagatcactactggcagtgcctggtttagcttcctggagagccacaacaagctggacaaagacaacctctcctacattgagcacatctttgagatctcccgccgtcctgacctactcactatggtggttgactacagaacccgtgtgctgaagatctctgaggaggatgagctggacaccaagctaacccgtatccccagtgccaagaagtacaaagacattatccggcagccctctgaggaagagatcatcaaattggctcccccaccgaagaaggcctgagcaagggggaggaagaggaggaaggttggaccttcatcagaccactcccttcccccatcctccaggagagggggcaagggcaacccaccatctacccacttactaacctggtcctaacccccttactgtgcgcgtgtgtgtgcgtgtgcgcacgctctggctgtttgtctatatgtctagctcatctagttcctcttcttaaggggatgggggtcaggggctaggggagggggctgagtttccccactttaggaggaggtgggggctatttctatgcaaatagaaatcagcacattcctcctacttccctttcctccactccccccatatctttaaagtgtggaagcagaaaggacctgcattttcctacattgaggagctgacataggggtaaggtatgggagaggtaggtggatccagggaaaagcagtggggacggaaggcaaagagaccactcaacccccacctggaaggggcaaagaaaagccagagttccatgtttgtactcctgtgctggactgtttcctgagtaccagcaggtccctttttgtctctcatgggcctagcataggtatgagccagggatcctttcctggtccctaagatcaaaccccatggagcagccagcgttagatgcccccacccacctgtactctggagagactgtgctgggaacatgtaccactgagcctgagatggggatgagggcagagagaggggagccccctcttccactcagttgttcctactcagactgttgcactctaaacctagggaggttgaagaatgagacccttaggttttaacacgaatcctgacaccaccatctatagggtcccaacttggttattgtaggcaaccttccctctctccttggtgaagaacatcccaagccagaaagaagttaactacagtgttttcctttgcaccgatccccaccccaattcaatcccggaagggacttacttaggaaacccttctttactagatatcctggccccctgggcttgtgaacacctcctagccacatcactacagtacagtgagtgaccccagcctcctgcctaccccaagatgcccctccccaccctgaccgtgctaactgtgtgtacatatatattctacatatatgtatattaaaactgcactgccatgtctgcccttttttgtggtgtctagcattaacttattgtctaggccagagcgggggtgggaggggaatgccacagtgaagggagtggcagaatcaaattgctacatagtccaaacaaaaaagaaggctttttcaaaaaacattaaattcacatgcagtctcagagactatttagacaaagttcaagttaggagcttttaggatgtgggagtaaaactttaatgggaggggagggctggctgctggaagaaggaagaagccagactggttagacagtactcttaactcctagcccagcctagcgtgccctgcccctctggccactgctgcagacacctgccttaacacacacacctctaggactccacagttttgccttaaaggaccttcccaagtctccctttccctgtctggcttctcccttaagaagagagagatacttgtagaattgggtggggggaatgagcatgaactgtccttccatttgggatatgttacattagagtgagagagagaataaggagcctttcttatggaagaaatgggagaagagagacagggttcttttcagcagagtctagtagtttctctgtaaggcaaaataatctaaaaagactaacctgcccacccactccttatattgctgtgagattgcccctatcttgtgctcttctgtctgcagtgtgcacggccttgttctaacccggaataaaggtgattgattgtattgcaaaaaaa

SEQ ID NO: 165 - protein, 130 aa, Homo sapiens
MAEYGTLLQDLTNNITLEDLEQLKSACKEDIPSEKSEEITTGSAWFSFLESHNKLDKDNLSYIEHIFEISRRPDLLTMVVDYRTRVLKISEEDELDTKLTRIPSAKKYKDIIRQPSEEEIIKLAPPPKKA

SEQ ID NO: 166 - DNA, 1466 bp, Homo sapiens
ggccacagtgcgcatgtgtgcggctgtgctttggctcttcgggtaaagatggcggagcgcgggtacagcttttcgctgactacattcagcccgtctggtaaacttgtccagattgaatatgctttggctgctgtagctggaggagccccgtccgtgggaattaaagctgcaaatggtgtggtattagcaactgagaaaaaacagaaatccattctgtatgatgagcgaagtgtacacaaagtagaaccaattaccaagcatataggtttggtgtacagtggcatgggccccgattacagagtgcttgtgcacagagctcgaaaactagctcaacaatactatcttgtgtaccaagaacccattcctacagctcagctggtacagagagtagcttctgtgatgcaagaatatactcagtcaggtggtgttcgtccatttggagtttctttacttatttgtggttggaatgagggacgaccatatttatttcagtcagatccatctggagcttactttgcctggaaagctacagcaatgggaaagaactatgtgaatgggaagactttccttgagaaaagatataatgaagatctggaacttgaagatgccattcatacagccatcttaaccctaaaggaaagctttgaagggcaaatgacagaggataacatagaagttggaatctgcaatgaagctggatttaggaggcttactccaactgaagttaaggattacttggctgccatagcataacaatgaagtgactgaaaaatccagaatttcagataatctatctacttaaacatgtttaaagtatgttttgttttgcagactttttgcatacttatttctacatggtttaaatcgactgtttttaaaatgacacttataaatcctaataaactgttaaacccaccttccagccttttaggagttgctaaaattttaacagttatttcctgctttttatcacagttgatttctgaagactacattgccaagcagaatgatgaaatgactttttcgttgtcaggcaattttggttaagtcaaatcttaatgccctcttcgctatcagatgttgcctgtgtttccataaagcaaaatgctgattttggtaaaaaacatgactgcttctagagctgggaggatctgcagactttcacggattcatggaacaagaaaagaagcataggtacttttaggtgccattaggtattgatcagtgaaatcctagggtgctctatgagattgtactaggcctatgaagagtggtaagccaaataggtctccatgggagatacattatgtaaataaataaacaatggtttgctggttcctgttggtgtctccacaagtaggtaaacatgtttaaaggaacccgggttcttagattttgttagactttttaaactcaaggatgagcataagtgcttgaaataaaatgctaatacttaagtgtcaaaa

SEQ ID NO: 167 - protein, 234 aa, Homo sapiens
MAERGYSFSLTTFSPSGKLVQIEYALAAVAGGAPSVGIKAANGVVLATEKKQKSILYDERSVHKVEPITKHIGLVYSGMGPDYRVLVHRARKLAQQYYLVYQEPIPTAQLVQRVASVMQEYTQSGGVRPFGVSLLICGWNEGRPYLFQSDPSGAYFAWKATAMGKNYVNGKTFLEKRYNEDLELEDAIHTAILTLKESFEGQMTEDNIEVGICNEAGFRRLTPTEVKDYLAAIA

SEQ ID NO: 168 - DNA, 1012 bp, Homo sapiens
aggcggagctgggtgcgagcgccctaccgctttcgctttcccttcgcggtgcccactccactccttgtgcggcgctaggccccccgtcccggtcatggccatgctcagggtccagcccgaggcccaagccaaggtggatgtgtttcgtgaagacctctgtaccaagacagagaacctgctcgggagctatttccccaagaagatttctgagctggatgcatttttaaaggagccagctctcaatgaagccaacttgagcaatctgaaggccccattggacatcccagtgcctgatccagtcaaggagaaagagaaagaggagcggaagaaacagcaggagaaggaagacaaggatgaaaagaagaagggggaggatgaagacaaaggtcctccctgtggcccagtgaactgcaatgaaaagatcgtggtccttctgcagcgcttgaagcctgagatcaaggatgtcattgagcagctcaacctggtcaccacctggttgcagctgcagatacctcggattgaggatggtaacaattttggagtggctgtccaggagaaggtgtttgagctgatgaccagcctccacaccaagctagaaggcttccacactcaaatctctaagtatttctctgagcgtggtgatgcagtgactaaagcagccaagcagccccatgtgggtgattatcggcagctggtgcacgagctggatgaggcagagtaccgggacatccggctgatggtcatggagatccgcaatgcttatgctgtgttatatgacatcatcctgaagaacttcgagaagctcaagaagcccaggggagaaacaaagggaatgatctattgagagccctctctcccattctgtgatgagtacagcagagaccttcctgctttttactggggactccagattttccccaaacttgcttctgttgagatttttccctcaccttgcctctcaggcacaataaatatagttataccactgcccatcaaaaaaaaaaaaaaaaaa

SEQ ID NO: 169 - protein, 249 aa, Homo sapiens
MAMLRVQPEAQAKVDVFREDLCTKTENLLGSYFPKKISELDAFLKEPALNEANLSNLKAPLDIPVPDPVKEKEKEERKKQQEKEDKDEKKKGEDEDKGPPCGPVNCNEKIVVLLQRLKPEIKDVIEQLNLVTTWLQLQIPRIEDGNNFGVAVQEKVFELMTSLHTKLEGFHTQISKYFSERGDAVTKAAKQPHVGDYRQLVHELDEAEYRDIRLMVMEIRNAYAVLYDIILKNFEKLKKPRGETKGMIY

SEQ ID NO: 170 - DNA, 1187 bp, Homo sapiens
aggcggagctgggtgcgagcgccctaccgctttcgctttcccttcgcggtgcccactccactccttgtgcggcgctaggccccccgtcccggtcatggccatgctcagggtccagcccgaggcccaagccaaggtggatgtgtttcgtgaagacctctgtaccaagacagagaacctgctcgggagctatttccccaagaagatttctgagctggatgcatttttaaaggagccagctctcaatgaagccaacttgagcaatctgaaggccccattggacatcccagtgcctgatccagtcaaggagaaagagaaagaggagcggaagaaacagcaggagaaggaagacaaggatgaaaagaagaagggggaggatgaagacaaaggtcctccctgtggcccagtgaactgcaatgaaaagatcgtggtccttctgcagcgcttgaagcctgagatcaaggatgtcattgagcagctcaacctggtcaccacctggttgcagctgcagatacctcggattgaggatggtaacaattttggagtggctgtccaggagaaggtgtttgagctgatgaccagcctccacaccaagctagaaggcttccacactcaaatctctaagtatttctctgagcgtggtgatgcagtgactaaagcagccaagcagccccatgtgggtgattatcggcagctggtgcacgagctggatgaggcagagtaccgggacatccggctgatggtcatggagatccgcaatgcttatgtgaggaggcaagggcagggcaggggtgggcagaggcagctttcccaggccacccactccctgaccctgcaggctaggggttaagggtgacaaagctcagcttctccacaaggctagaaatggggcacagagccactggaggcctctgactgacctctactccctggccctgtaggctgtgttatatgacatcatcctgaagaacttcgagaagctcaagaagcccaggggagaaacaaagggaatgatctattgagagccctctctcccattctgtgatgagtacagcagagaccttcctgctttttactggggactccagattttccccaaacttgcttctgttgagatttttccctcaccttgcctctcaggcacaataaatatagttataccactgcccatcaaaaaaaaaaaaaaaaaa

SEQ ID NO: 171 - protein, 250 aa, Homo sapiens
MAMLRVQPEAQAKVDVFREDLCTKTENLLGSYFPKKISELDAFLKEPALNEANLSNLKAPLDIPVPDPVKEKEKEERKKQQEKEDKDEKKKGEDEDKGPPCGPVNCNEKIVVLLQRLKPEIKDVIEQLNLVTTWLQLQIPRIEDGNNFGVAVQEKVFELMTSLHTKLEGFHTQISKYFSERGDAVTKAAKQPHVGDYRQLVHELDEAEYRDIRLMVMEIRNAYVRRQGQGRGGQRQLSQATHSLTLQARG

SEQ ID NO: 172 - DNA, 4499 bp, Homo sapiens
ccagagtgcattgcggggccgcttcctttccgctcggctgttttcctgcgcaggagccgcagggccgtaggcagccatggcgcccagccggaatggcatggtcttgaagccccacttccacaaggactggcagcggcgcgtggccacgtggttcaaccagccggcccgtaagatccgcagacgtaaggcccggcaagccaaggcgcgccgcatcgccccgcgccccgcgtcgggtcccatccggcccatcgtgcgctgccccacggttcggtaccacacgaaggtgcgcgccggccgcggcttcagcctggaggagctcagggtggccggcattcacaagaaggtggcccggaccatcggcatttctgtggatccgaggaggcggaacaagtccacggagtccctgcaggccaacgtgcagcggctgaaggagtaccgctccaaactcatcctcttccccaggaagccctcggcccccaagaagggagacagttctgctgaagaactgaaactggccacccagctgaccggaccggtcatgcccgtccggaacgtctataagaaggagaaagctcgagtcatcactgaggaagagaagaatttcaaagccttcgctagtctccgtatggcccgtgccaacgcccggctcttcggcatacgggcaaaaagagccaaggaagccgcagaacaggatgttgaaaagaaaaaataaagccctcctggggacttggaatcagtcggcagtcatgctgggtctccacgtggtgtgtttcgtgggaacaactgggcctgggatggggcttcactgctgtgacttcctcctgccaggggatttggggctttcttgaaagacagtccaagccctggataatgctttactttctgtgttgaagcactgttggttgtttggttagtgactgatgtaaaacggttttcttgtggggaggttacagaggctgacttcagagtggacttgtgttttttctttttaaagaggcaaggttgggctggtgctcacagctgtaatcccagcactttgaggttggctgggagttcaagaccagcctggccaacatgtcagaactactaaaaataaagaaatcagccatgcttggtgctgcacacttgtagttgcagctcctgggaggcagaggtgagggatcacttaacccaggaggcagaggctgcactgagccaggatcacgccactgcactctagcctgggcaacagtgagactgtctcaaaaaaaaaaaaagagacagggtcttcggcacccaggctggagtacagtgccacaatcatggctcactgcagtcttgaactcatggcctcaagcagtcctccctcagcctcccaagtagaggggtttataggcacgagaccctgcacccaacctagagttgccttttttaagcaaagcagtttctagttaatgtagcatcttggactttggggcgtcattcttaagcttgttgtgcccggtaaccatggtcctcttgctctgattaacccttccttcaatgggcttcttcacccagacaccaaggtatgagatggccctgccaagtgtcggcctctcctgttaaacaaaaacattctaaagccattgttcttgcttcatggacaagaggcagccagagagagtgccagggtgccctggtctgagctggcatccccatgtcttctgtgtccgagggcagcatggtttctcgtgcagtgctcagacacagcctgccctagtcctaccagctcacagcagcacctgctctccttggcagctatggccatgacaaccccagagaagcagcttcagggaccgagtcagattctgttttgtctacatgcctctgccgggtgccggtattgaggcacccagggagctgttactggcgtggaaataggtgatgctgctacctctgctgctgcactcacagccacacttgatacacgatgacaccttgcttgtttggaaacatctaaacatctagtagatgacttgcaggctgttggctaccagtttcctgtctgaggtgtatatgttaacttcgtgatcagtttgtatgtttgggactcttgtcctatgtaaagttaaggtgggccgggtgcagtggctcacgcctgtaatcctaacactgggaggccgaggcgggtggatcacctgatggtgaaacctcatctctactgaaaatacaaaaattagctgagtggtgacacacgcctgtaatcccagctacttggtaggcttgaacccaggaggcagagattgcagtgagccgagctgcaccactgtgctccagcctgggtgacagcgagactcagtctcaaaaaaagttgtacaaggtggatggttggaagcttgagcctaggctcgaatccctctcacgtgagagggcctgaagatttctggtggattccaacctggctgaagactggccgtggggggtgcaggggtctccagcgctctgccctccagcctgcttcctccctgcccacaccgcactaggggaagggcctttcctgctgcctgcggggccgcacctggagtaggtaatgccatgtggtgacgtgaatggagcagaggtctgtgccccatcacaccgccttgctgtttttactgtgggacaaaagcactctgatctgcgtgttccgggggccctcctaccagccgacttgacgggaagtcagggttcaggtatcatctgtgcacctggggcggggtagtctgcactgaacctgccagagtcccctcctcatttcactgaaagtcacagtctccagggctgtgttgctaaccttacgttctctccgtttgcttaatctattaagagccctaacaggagaggatgggctttctctgttgtctggggccctgctgttggccggtgctcttagcaagaggtcatttttctaggttgcgctgggacattgtgagtttggtgagggtcatggatgtgggctgggctgggctgggctgggccgggctgcctgctgcctgctgctcccctacctgaaatgcagctagtgcggctctgcccttcctggggctgaggaaggcttctgcaggatagctggggggctgggcaggtgggtgaggcagcctccctgctgacactcagtccttgtagctggagcaagatctcctgatccaggtacgggcctgtctgctccaagaaagactctgccaccagatgcaaaggggccctttgttttaacttagtccctggggaccgcctgattcagcacctgtcggcccaggataccccgctggtggggacaagtgcctgagtgtgggccgtgcccgagtgtggccatccctgagtggggccgtcctgactaggaagtggcttttcagttgtgatgtgtgggcctgacctagggggcgctgtggaacccgggctggaaccagccctctgtgccaggccgcagacaggttccgccggccctgaggggcagctgccatggcgtgggtcactgggagctgagaggaagggcccccaccgcacctcaggcaaagcggctctgggaacaccttgatttcgtccatgtgagccgtcccagggagggcagccaagctgtgaagcctgagaaactgacctgtgtgccacgagcttgtggtctgctgcccggtggaggaagtgcaggtgcgcccaggctcctcattccgttttgcaggattccttcggggtgtgagcatttcctattcagcctgtcgcccccggggagcacgggctggctctgtggtgcccgtggccttttgtagaagcgttggttttacggcaggttcatctctggggcagcctcccacagtgggtggggctttgccagcagtgcccacgggggtcatggggccaggcgcgctccggcgcctgcagaactgatcggggatagtctcaggaggcgctagtcacgtgccccggtgatcggggatagtctcagaaggcgctagtctcctgccccggtgatcggggatagtctcaggaggcacgagtcgcctgcctcggtgatgcaccgtttctcacaccggctgctctggcccgagctaaaggggaagacgtgtgcggataggagctgcacacaattttcctccatgtattgtttattttgctttttcttttggctagacattaggaatttcagttttcccaagttgtatttttccttttctattttaaaattatcatgcagggctgggtgaggtcgctcacgcctatagtctcaaaactttgggaggctgaggggggaggatggcatgagcccaggagtttaaggctgcagtgagccgagatcgctccactgtcctccagcctgcatgacagagcgagaccctatctcaggaaaaaaaaaaacaaaactattatgcagtagtttcgaccctggaagacgagtgtgcatctttgagttgtaacacgtgtacctcgcccatccaggcgtagtttcatttggaatctggttatcctgtagttgctttgttaaaaatatatgtaattgcaaatcattt

SEQ ID NO: 173 - protein, 211 aa, Homo sapiens [sequence omitted]

SEQ ID NO: 174 - DNA, 4442 bp, Homo sapiens
ccagagtgcattgcggggccgcttcctttccgctcggctgttttcctgcgcaggagccgcagggccgtaggcagccatggcgcccagccggaatggcatggtcttgaagccccacttccacaaggactggcagcggcgcgtggccacgtggttcaaccagccggcccgtaagatccgcagacgtaaggcccggcaagccaaggcgcgccgcatcgccccgcgccccgcgtcgggtcccatccggcccatcgtgcgctgccccacggttcggtaccacacgaagaaggtggcccggaccatcggcatttctgtggatccgaggaggcggaacaagtccacggagtccctgcaggccaacgtgcagcggctgaaggagtaccgctccaaactcatcctcttccccaggaagccctcggcccccaagaagggagacagttctgctgaagaactgaaactggccacccagctgaccggaccggtcatgcccgtccggaacgtctataagaaggagaaagctcgagtcatcactgaggaagagaagaatttcaaagccttcgctagtctccgtatggcccgtgccaacgcccggctcttcggcatacgggcaaaaagagccaaggaagccgcagaacaggatgttgaaaagaaaaaataaagccctcctggggacttggaatcagtcggcagtcatgctgggtctccacgtggtgtgtttcgtgggaacaactgggcctgggatggggcttcactgctgtgacttcctcctgccaggggatttggggctttcttgaaagacagtccaagccctggataatgctttactttctgtgttgaagcactgttggttgtttggttagtgactgatgtaaaacggttttcttgtggggaggttacagaggctgacttcagagtggacttgtgttttttctttttaaagaggcaaggttgggctggtgctcacagctgtaatcccagcactttgaggttggctgggagttcaagaccagcctggccaacatgtcagaactactaaaaataaagaaatcagccatgcttggtgctgcacacttgtagttgcagctcctgggaggcagaggtgagggatcacttaacccaggaggcagaggctgcactgagccaggatcacgccactgcactctagcctgggcaacagtgagactgtctcaaaaaaaaaaaaagagacagggtcttcggcacccaggctggagtacagtgccacaatcatggctcactgcagtcttgaactcatggcctcaagcagtcctccctcagcctcccaagtagaggggtttataggcacgagaccctgcacccaacctagagttgccttttttaagcaaagcagtttctagttaatgtagcatcttggactttggggcgtcattcttaagcttgttgtgcccggtaaccatggtcctcttgctctgattaacccttccttcaatgggcttcttcacccagacaccaaggtatgagatggccctgccaagtgtcggcctctcctgttaaacaaaaacattctaaagccattgttcttgcttcatggacaagaggcagccagagagagtgccagggtgccctggtctgagctggcatccccatgtcttctgtgtccgagggcagcatggtttctcgtgcagtgctcagacacagcctgccctagtcctaccagctcacagcagcacctgctctccttggcagctatggccatgacaaccccagagaagcagcttcagggaccgagtcagattctgttttgtctacatgcctctgccgggtgccggtattgaggcacccagggagctgttactggcgtggaaataggtgatgctgctacctctgctgctgcactcacagccacacttgatacacgatgacaccttgcttgtttggaaacatctaaacatctagtagatgacttgcaggctgttggctaccagtttcctgtctgaggtgtatatgttaacttcgtgatcagtttgtatgtttgggactcttgtcctatgtaaagttaaggtgggccgggtgcagtggctcacgcctgtaatcctaacactgggaggccgaggcgggtggatcacctgatggtgaaacctcatctctactgaaaatacaaaaattagctgagtggtgacacacgcctgtaatcccagctacttggtaggcttgaacccaggaggcagagattgcagtgagccgagctgcaccactgtgctccagcctgggtgacagcgagactcagtctcaaaaaaagttgtacaaggtggatggttggaagcttgagcctaggctcgaatccctctcacgtgagagggcctgaagatttctggtggattccaacctggctgaagactggccgtggggggtgcaggggtctccagcgctctgccctccagcctgcttcctccctgcccacaccgcactaggggaagggcctttcctgctgcctgcggggccgcacctggagtaggtaatgccatgtggtgacgtgaatggagcagaggtctgtgccccatcacaccgccttgctgtttttactgtgggacaaaagcactctgatctgcgtgttccgggggccctcctaccagccgacttgacgggaagtcagggttcaggtatcatctgtgcacctggggcggggtagtctgcactgaacctgccagagtcccctcctcatttcactgaaagtcacagtctccagggctgtgttgctaaccttacgttctctccgtttgcttaatctattaagagccctaacaggagaggatgggctttctctgttgtctggggccctgctgttggccggtgctcttagcaagaggtcatttttctaggttgcgctgggacattgtgagtttggtgagggtcatggatgtgggctgggctgggctgggctgggccgggctgcctgctgcctgctgctcccctacctgaaatgcagctagtgcggctctgcccttcctggggctgaggaaggcttctgcaggatagctggggggctgggcaggtgggtgaggcagcctccctgctgacactcagtccttgtagctggagcaagatctcctgatccaggtacgggcctgtctgctccaagaaagactctgccaccagatgcaaaggggccctttgttttaacttagtccctggggaccgcctgattcagcacctgtcggcccaggataccccgctggtggggacaagtgcctgagtgtgggccgtgcccgagtgtggccatccctgagtggggccgtcctgactaggaagtggcttttcagttgtgatgtgtgggcctgacctagggggcgctgtggaacccgggctggaaccagccctctgtgccaggccgcagacaggttccgccggccctgaggggcagctgccatggcgtgggtcactgggagctgagaggaagggcccccaccgcacctcaggcaaagcggctctgggaacaccttgatttcgtccatgtgagccgtcccagggagggcagccaagctgtgaagcctgagaaactgacctgtgtgccacgagcttgtggtctgctgcccggtggaggaagtgcaggtgcgcccaggctcctcattccgttttgcaggattccttcggggtgtgagcatttcctattcagcctgtcgcccccggggagcacgggctggctctgtggtgcccgtggccttttgtagaagcgttggttttacggcaggttcatctctggggcagcctcccacagtgggtggggctttgccagcagtgcccacgggggtcatggggccaggcgcgctccggcgcctgcagaactgatcggggatagtctcaggaggcgctagtcacgtgccccggtgatcggggatagtctcagaaggcgctagtctcctgccccggtgatcggggatagtctcaggaggcacgagtcgcctgcctcggtgatgcaccgtttctcacaccggctgctctggcccgagctaaaggggaagacgtgtgcggataggagctgcacacaattttcctccatgtattgtttattttgctttttcttttggctagacattaggaatttcagttttcccaagttgtatttttccttttctattttaaaattatcatgcagggctgggtgaggtcgctcacgcctatagtctcaaaactttgggaggctgaggggggaggatggcatgagcccaggagtttaaggctgcagtgagccgagatcgctccactgtcctccagcctgcatgacagagcgagaccctatctcaggaaaaaaaaaaacaaaactattatgcagtagtttcgaccctggaagacgagtgtgcatctttgagttgtaacacgtgtacctcgcccatccaggcgtagtttcatttggaatctggttatcctgtagttgctttgttaaaaatatatgtaattgcaaatcattt

SEQ ID NO: 175 - protein, 192 aa, Homo sapiens
MAPSRNGMVLKPHFHKDWQRRVATWFNQPARKIRRRKARQAKARRIAPRPASGPIRPIVRCPTVRYHTKKVARTIGISVDPRRRNKSTESLQANVQRLKEYRSKLILFPRKPSAPKKGDSSAEELKLATQLTGPVMPVRNVYKKEKARVITEEEKNFKAFASLRMARANARLFGIRAKRAKEAAEQDVEKKK

SEQ ID NO: 176 - DNA, 4358 bp, Homo sapiens
ccagagtgcattgcggggccgcttcctttccgctcggctgttttcctgcgcaggagccgcagggccgtaggcagccatggcgcccagccggaatggcatggtcttgaagccccacttccacaaggactggcagcggcgcgtggccacgtggttcaaccagccggcccgtaagatccgcagacgtaaggcccggcaagccaaggcgcgccgcatcgccccgcgccccgcgtcgggtcccatccggcccatcgtgcgctgccccacggttcggtaccacacgaaggtgcgcgccggccgcggcttcagcctggaggagctcagggtggccggcattcacaagaagggagacagttctgctgaagaactgaaactggccacccagctgaccggaccggtcatgcccgtccggaacgtctataagaaggagaaagctcgagtcatcactgaggaagagaagaatttcaaagccttcgctagtctccgtatggcccgtgccaacgcccggctcttcggcatacgggcaaaaagagccaaggaagccgcagaacaggatgttgaaaagaaaaaataaagccctcctggggacttggaatcagtcggcagtcatgctgggtctccacgtggtgtgtttcgtgggaacaactgggcctgggatggggcttcactgctgtgacttcctcctgccaggggatttggggctttcttgaaagacagtccaagccctggataatgctttactttctgtgttgaagcactgttggttgtttggttagtgactgatgtaaaacggttttcttgtggggaggttacagaggctgacttcagagtggacttgtgttttttctttttaaagaggcaaggttgggctggtgctcacagctgtaatcccagcactttgaggttggctgggagttcaagaccagcctggccaacatgtcagaactactaaaaataaagaaatcagccatgcttggtgctgcacacttgtagttgcagctcctgggaggcagaggtgagggatcacttaacccaggaggcagaggctgcactgagccaggatcacgccactgcactctagcctgggcaacagtgagactgtctcaaaaaaaaaaaaagagacagggtcttcggcacccaggctggagtacagtgccacaatcatggctcactgcagtcttgaactcatggcctcaagcagtcctccctcagcctcccaagtagaggggtttataggcacgagaccctgcacccaacctagagttgccttttttaagcaaagcagtttctagttaatgtagcatcttggactttggggcgtcattcttaagcttgttgtgcccggtaaccatggtcctcttgctctgattaacccttccttcaatgggcttcttcacccagacaccaaggtatgagatggccctgccaagtgtcggcctctcctgttaaacaaaaacattctaaagccattgttcttgcttcatggacaagaggcagccagagagagtgccagggtgccctggtctgagctggcatccccatgtcttctgtgtccgagggcagcatggtttctcgtgcagtgctcagacacagcctgccctagtcctaccagctcacagcagcacctgctctccttggcagctatggccatgacaaccccagagaagcagcttcagggaccgagtcagattctgttttgtctacatgcctctgccgggtgccggtattgaggcacccagggagctgttactggcgtggaaataggtgatgctgctacctctgctgctgcactcacagccacacttgatacacgatgacaccttgcttgtttggaaacatctaaacatctagtagatgacttgcaggctgttggctaccagtttcctgtctgaggtgtatatgttaacttcgtgatcagtttgtatgtttgggactcttgtcctatgtaaagttaaggtgggccgggtgcagtggctcacgcctgtaatcctaacactgggaggccgaggcgggtggatcacctgatggtgaaacctcatctctactgaaaatacaaaaattagctgagtggtgacacacgcctgtaatcccagctacttggtaggcttgaacccaggaggcagagattgcagtgagccgagctgcaccactgtgctccagcctgggtgacagcgagactcagtctcaaaaaaagttgtacaaggtggatggttggaagcttgagcctaggctcgaatccctctcacgtgagagggcctgaagatttctggtggattccaacctggctgaagactggccgtggggggtgcaggggtctccagcgctctgccctccagcctgcttcctccctgcccacaccgcactaggggaagggcctttcctgctgcctgcggggccgcacctggagtaggtaatgccatgtggtgacgtgaatggagcagaggtctgtgccccatcacaccgccttgctgtttttactgtgggacaaaagcactctgatctgcgtgttccgggggccctcctaccagccgacttgacgggaagtcagggttcaggtatcatctgtgcacctggggcggggtagtctgcactgaacctgccagagtcccctcctcatttcactgaaagtcacagtctccagggctgtgttgctaaccttacgttctctccgtttgcttaatctattaagagccctaacaggagaggatgggctttctctgttgtctggggccctgctgttggccggtgctcttagcaagaggtcatttttctaggttgcgctgggacattgtgagtttggtgagggtcatggatgtgggctgggctgggctgggctgggccgggctgcctgctgcctgctgctcccctacctgaaatgcagctagtgcggctctgcccttcctggggctgaggaaggcttctgcaggatagctggggggctgggcaggtgggtgaggcagcctccctgctgacactcagtccttgtagctggagcaagatctcctgatccaggtacgggcctgtctgctccaagaaagactctgccaccagatgcaaaggggccctttgttttaacttagtccctggggaccgcctgattcagcacctgtcggcccaggataccccgctggtggggacaagtgcctgagtgtgggccgtgcccgagtgtggccatccctgagtggggccgtcctgactaggaagtggcttttcagttgtgatgtgtgggcctgacctagggggcgctgtggaacccgggctggaaccagccctctgtgccaggccgcagacaggttccgccggccctgaggggcagctgccatggcgtgggtcactgggagctgagaggaagggcccccaccgcacctcaggcaaagcggctctgggaacaccttgatttcgtccatgtgagccgtcccagggagggcagccaagctgtgaagcctgagaaactgacctgtgtgccacgagcttgtggtctgctgcccggtggaggaagtgcaggtgcgcccaggctcctcattccgttttgcaggattccttcggggtgtgagcatttcctattcagcctgtcgcccccggggagcacgggctggctctgtggtgcccgtggccttttgtagaagcgttggttttacggcaggttcatctctggggcagcctcccacagtgggtggggctttgccagcagtgcccacgggggtcatggggccaggcgcgctccggcgcctgcagaactgatcggggatagtctcaggaggcgctagtcacgtgccccggtgatcggggatagtctcagaaggcgctagtctcctgccccggtgatcggggatagtctcaggaggcacgagtcgcctgcctcggtgatgcaccgtttctcacaccggctgctctggcccgagctaaaggggaagacgtgtgcggataggagctgcacacaattttcctccatgtattgtttattttgctttttcttttggctagacattaggaatttcagttttcccaagttgtatttttccttttctattttaaaattatcatgcagggctgggtgaggtcgctcacgcctatagtctcaaaactttgggaggctgaggggggaggatggcatgagcccaggagtttaaggctgcagtgagccgagatcgctccactgtcctccagcctgcatgacagagcgagaccctatctcaggaaaaaaaaaaacaaaactattatgcagtagtttcgaccctggaagacgagtgtgcatctttgagttgtaacacgtgtacctcgcccatccaggcgtagtttcatttggaatctggttatcctgtagttgctttgttaaaaatatatgtaattgcaaatcattt

SEQ ID NO: 177 - protein, 164 aa, Homo sapiens
MAPSRNGMVLKPHFHKDWQRRVATWFNQPARKIRRRKARQAKARRIAPRPASGPIRPIVRCPTVRYHTKVRAGRGFSLEELRVAGIHKKGDSSAEELKLATQLTGPVMPVRNVYKKEKARVITEEEKNFKAFASLRMARANARLFGIRAKRAKEAAEQDVEKKK

SEQ ID NO: 178 - DNA, 4672 bp, Homo sapiens
aggtgagggagactgggtcctggcctttgggcatcatccagcgccatcggcctggcgcttcagccaacgcgggagtggatgggccccttcttcttcgcagacagcgttcggccgctgcccgggctctaggcgcggccggacggcccagtctggagggttcggggcggaggcccgggggggtgcgcgcgcccggggtccggcctctcactcgctcccctctcgtccgcagccgcagggccgtaggcagccatggcgcccagccggaatggcatggtcttgaagccccacttccacaaggactggcagcggcgcgtggccacgtggttcaaccagccggcccgtaagatccgcagacgtaaggcccggcaagccaaggcgcgccgcatcgccccgcgccccgcgtcgggtcccatccggcccatcgtgcgctgccccacggttcggtaccacacgaaggtgcgcgccggccgcggcttcagcctggaggagctcagggtggccggcattcacaagaaggtggcccggaccatcggcatttctgtggatccgaggaggcggaacaagtccacggagtccctgcaggccaacgtgcagcggctgaaggagtaccgctccaaactcatcctcttccccaggaagccctcggcccccaagaagggagacagttctgctgaagaactgaaactggccacccagctgaccggaccggtcatgcccgtccggaacgtctataagaaggagaaagctcgagtcatcactgaggaagagaagaatttcaaagccttcgctagtctccgtatggcccgtgccaacgcccggctcttcggcatacgggcaaaaagagccaaggaagccgcagaacaggatgttgaaaagaaaaaataaagccctcctggggacttggaatcagtcggcagtcatgctgggtctccacgtggtgtgtttcgtgggaacaactgggcctgggatggggcttcactgctgtgacttcctcctgccaggggatttggggctttcttgaaagacagtccaagccctggataatgctttactttctgtgttgaagcactgttggttgtttggttagtgactgatgtaaaacggttttcttgtggggaggttacagaggctgacttcagagtggacttgtgttttttctttttaaagaggcaaggttgggctggtgctcacagctgtaatcccagcactttgaggttggctgggagttcaagaccagcctggccaacatgtcagaactactaaaaataaagaaatcagccatgcttggtgctgcacacttgtagttgcagctcctgggaggcagaggtgagggatcacttaacccaggaggcagaggctgcactgagccaggatcacgccactgcactctagcctgggcaacagtgagactgtctcaaaaaaaaaaaaagagacagggtcttcggcacccaggctggagtacagtgccacaatcatggctcactgcagtcttgaactcatggcctcaagcagtcctccctcagcctcccaagtagaggggtttataggcacgagaccctgcacccaacctagagttgccttttttaagcaaagcagtttctagttaatgtagcatcttggactttggggcgtcattcttaagcttgttgtgcccggtaaccatggtcctcttgctctgattaacccttccttcaatgggcttcttcacccagacaccaaggtatgagatggccctgccaagtgtcggcctctcctgttaaacaaaaacattctaaagccattgttcttgcttcatggacaagaggcagccagagagagtgccagggtgccctggtctgagctggcatccccatgtcttctgtgtccgagggcagcatggtttctcgtgcagtgctcagacacagcctgccctagtcctaccagctcacagcagcacctgctctccttggcagctatggccatgacaaccccagagaagcagcttcagggaccgagtcagattctgttttgtctacatgcctctgccgggtgccggtattgaggcacccagggagctgttactggcgtggaaataggtgatgctgctacctctgctgctgcactcacagccacacttgatacacgatgacaccttgcttgtttggaaacatctaaacatctagtagatgacttgcaggctgttggctaccagtttcctgtctgaggtgtatatgttaacttcgtgatcagtttgtatgtttgggactcttgtcctatgtaaagttaaggtgggccgggtgcagtggctcacgcctgtaatcctaacactgggaggccgaggcgggtggatcacctgatggtgaaacctcatctctactgaaaatacaaaaattagctgagtggtgacacacgcctgtaatcccagctacttggtaggcttgaacccaggaggcagagattgcagtgagccgagctgcaccactgtgctccagcctgggtgacagcgagactcagtctcaaaaaaagttgtacaaggtggatggttggaagcttgagcctaggctcgaatccctctcacgtgagagggcctgaagatttctggtggattccaacctggctgaagactggccgtggggggtgcaggggtctccagcgctctgccctccagcctgcttcctccctgcccacaccgcactaggggaagggcctttcctgctgcctgcggggccgcacctggagtaggtaatgccatgtggtgacgtgaatggagcagaggtctgtgccccatcacaccgccttgctgtttttactgtgggacaaaagcactctgatctgcgtgttccgggggccctcctaccagccgacttgacgggaagtcagggttcaggtatcatctgtgcacctggggcggggtagtctgcactgaacctgccagagtcccctcctcatttcactgaaagtcacagtctccagggctgtgttgctaaccttacgttctctccgtttgcttaatctattaagagccctaacaggagaggatgggctttctctgttgtctggggccctgctgttggccggtgctcttagcaagaggtcatttttctaggttgcgctgggacattgtgagtttggtgagggtcatggatgtgggctgggctgggctgggctgggccgggctgcctgctgcctgctgctcccctacctgaaatgcagctagtgcggctctgcccttcctggggctgaggaaggcttctgcaggatagctggggggctgggcaggtgggtgaggcagcctccctgctgacactcagtccttgtagctggagcaagatctcctgatccaggtacgggcctgtctgctccaagaaagactctgccaccagatgcaaaggggccctttgttttaacttagtccctggggaccgcctgattcagcacctgtcggcccaggataccccgctggtggggacaagtgcctgagtgtgggccgtgcccgagtgtggccatccctgagtggggccgtcctgactaggaagtggcttttcagttgtgatgtgtgggcctgacctagggggcgctgtggaacccgggctggaaccagccctctgtgccaggccgcagacaggttccgccggccctgaggggcagctgccatggcgtgggtcactgggagctgagaggaagggcccccaccgcacctcaggcaaagcggctctgggaacaccttgatttcgtccatgtgagccgtcccagggagggcagccaagctgtgaagcctgagaaactgacctgtgtgccacgagcttgtggtctgctgcccggtggaggaagtgcaggtgcgcccaggctcctcattccgttttgcaggattccttcggggtgtgagcatttcctattcagcctgtcgcccccggggagcacgggctggctctgtggtgcccgtggccttttgtagaagcgttggttttacggcaggttcatctctggggcagcctcccacagtgggtggggctttgccagcagtgcccacgggggtcatggggccaggcgcgctccggcgcctgcagaactgatcggggatagtctcaggaggcgctagtcacgtgccccggtgatcggggatagtctcagaaggcgctagtctcctgccccggtgatcggggatagtctcaggaggcacgagtcgcctgcctcggtgatgcaccgtttctcacaccggctgctctggcccgagctaaaggggaagacgtgtgcggataggagctgcacacaattttcctccatgtattgtttattttgctttttcttttggctagacattaggaatttcagttttcccaagttgtatttttccttttctattttaaaattatcatgcagggctgggtgaggtcgctcacgcctatagtctcaaaactttgggaggctgaggggggaggatggcatgagcccaggagtttaaggctgcagtgagccgagatcgctccactgtcctccagcctgcatgacagagcgagaccctatctcaggaaaaaaaaaaacaaaactattatgcagtagtttcgaccctggaagacgagtgtgcatctttgagttgtaacacgtgtacctcgcccatccaggcgtagtttcatttggaatctggttatcctgtagttgctttgttaaaaatatatgtaattgcaaatcattt

SEQ ID NO: 179 - protein, 211 aa, Homo sapiens [sequence omitted]

SEQ ID NO: 180 - DNA, 531 bp, Homo sapiens
ggcagtctcgcgataactgcgcaggcgcggaccaaagcgatctcttctgaggatccggcaagatggcagaagtagagcagaagaagaagcggaccttccgcaagttcacctaccgcggcgtggacctcgaccagctgctggacatgtcctacgagcagctgatgcagctgtacagtgcgcgccagcggcggcggctgaaccggggcctgcggcggaagcagcactccctgctgaagcgcctgcgcaaggccaagaaggaggcgccgcccatggagaagccggaagtggtgaagacgcacctgcgggacatgatcatcctacccgagatggtgggcagcatggtgggcgtctacaacggcaagaccttcaaccaggtggagatcaagcccgagatgatcggccactacctgggcgagttctccatcacctacaagcccgtaaagcatggccggcccggcatcggggccacccactcctcccgcttcatccctctcaagtaatggctcagctaataaaggcgcacatgactcc

SEQ ID NO: 181 - protein, 145 aa, Homo sapiens [sequence omitted]

SEQ ID NO: 182 - DNA, 3656 bp, Homo sapiens
agcgatccgaggcccggccccggccccgccccgcgccgcgccgcgccgcttgccgccgggctagcactgacgtgtctctcggcggagctgctgtgcagtggaacgcgctgggccgcgggcagcgtcgcctcacgcggagcagagctgagctgaagcgggacccggagcccgagcagccgccgccatggcaatcaaatttctggaagtcatcaagcccttctgtgtcatcctgccggaaattcagaagccagagaggaagattcagtttaaggagaaagtgctgtggaccgctatcaccctctttatcttcttagtgtgctgccagattcccctgtttgggatcatgtcttcagattcagctgaccctttctattggatgagagtgattctagcctctaacagaggcacattgatggagctagggatctctcctattgtcacgtctggccttataatgcaactcttggctggcgccaagataattgaagttggtgacaccccaaaagaccgagctctcttcaacggagcccaaaagttatttggcatgatcattactatcggccagtctatcgtgtatgtgatgaccgggatgtatggggacccttctgaaatgggtgctggaatttgcctgctaatcaccattcagctctttgttgctggcttaattgtcctacttttggatgaactcctgcaaaaaggatatggccttggctctggtatttctctcttcattgcaactaacatctgtgaaaccatcgtatggaaggcattcagccccactactgtcaacactggccgaggaatggaatttgaaggtgctatcatcgcacttttccatctgctggccacacgcacagacaaggtccgagcccttcgggaggcgttctaccgccagaatcttcccaacctcatgaatctcatcgccaccatctttgtctttgcagtggtcatctatttccagggcttccgagtggacctgccaatcaagtcggcccgctaccgtggccagtacaacacctatcccatcaagctcttctatacgtccaacatccccatcatcctgcagtctgccctggtgtccaacctttatgtcatctcccaaatgctctcagctcgcttcagtggcaacttgctggtcagcctgctgggcacctggtcggacacgtcttctgggggcccagcacgtgcttatccagttggtggcctttgctattacctgtcccctccagaatcttttggctccgtgttagaagacccggtccatgcagttgtatacatagtgttcatgctgggctcctgtgcattcttctccaaaacgtggattgaggtctcaggttcctctgccaaagatgttgcaaagcagctgaaggagcagcagatggtgatgagaggccaccgagagacctccatggtccatgaactcaaccggtacatccccacagccgcggcctttggtgggctgtgcatcggggccctctcggtcctggctgacttcctaggcgccattgggtctggaaccgggatcctgctcgcagtcacaatcatctaccagtactttgagatcttcgttaaggagcaaagcgaggttggcagcatgggggccctgctcttctgagcccgtctcccggacaggttgaggaagctgctccagaagcgcctcggaaggggagctctcatcatggcgcgtgctgctgcggcatatggacttttaataatgtttttgaatttcgtattctttcattccactgtgtaaagtgctagacattttccaatttaaaattttgctttttatcctggcactggcaaaaagaactgtgaaagtgaaattttattcagccgactgccagagaagtgggaatggtataggattgtccccaagtgtccatgtaacttttgttttaacctttgcaccttctcagtgctgtatgcggctgcagccgtctcacctgtttccccacaaagggaatttctcactctggttggaagcacaaacactgaaatgtctacgtttcattttggcagtagggtgtgaagctgggagcagatcatgtatttcccggagacgtgggaccttgctggcatgtctccttcacaatcaggcgtgggaatatctggcttaggactgtttctctctaagacaccattgttttcccttattttaaaagtgatttttttaaggacagaacttcttccaaaagagagggatggctttcccagaagacactcctggccatctgtggatttgtctgtgcacctattggctcttctagctgactcttctggttgggcttagagtctgcctgtttctgctagctccgtgtttagtccacttgggtcatcagctctgccaagctgagcctggccaagctaggtggacagacccttgcagtgatgtccgtttgtccagattctgccagtcatcactggacacgtctcctcgcagctgccctagcaaggggagacattgtggtagctatcagacatggacagaaactgacttagtgctcacaagcccctacaccttctgggctgaagatcacccagctgtgttcagaattttcttactgtgcttaggactgcacgcaagtgagcagacaccaccgacttcctttctgcgtcaccagtgtcgtcagcagagagaggacagcacaggctcaaggttggtagtgaagtcaggttcggggtgcatgggctgtggtggtgttgatcagttgctccagtgtttgaaataagaagactcatgtttatgtctggaataagttctgtttgtgctgacaggtggcctaggtcctggagatgagcaccctctctctggcctttagggagtcccctcttaggacaggcactgcccagcagcaagggcagcagagttgggtgctaagatcctgaggagctcgaggtttcgagctggctttagacattggtgggaccaaggatgttttgcaggatgccctgatcctaagaagggggcctgggggtgcgtgcagcctgtcggggagaccccactctgacagtgggcacacggcagcctgcaaagcacagggccaccgccacagcccggcagaggggcacactctggagaccttgctggcagtgctagccaggaaacagagtgaccaagggacaagaagggacttgcctaaagccacccagcaactcagcagcagaaccaagatgggccccaggctcctccatatggcccagggcttaccaccctatcacacgtggccttgtctagacccagtcctgagcaggggagaggctcttgagacctgatgccctcctacccacatggttctcccactgccctgtctgctctgctgctacagaggggcagggcctcccccagcccacgcttaggaatgcttggcctctggcaggcaggcagctgtacccaagctggtgggcagggggctggaaggcaccaggcctcaggaggagccccatagtcccgcctgcagcctgtaaccatcggctgggccctgcaaggcccacactcacgccctgtgggtgatggtcacggtgggtgggtgggggctgaccccagcttccaggggactgtcactgtggacgccaaaatggcataactgagataaggtgaataagtgacaaataaagccagttttttacaaggtaaaaaaaaaaaaaaaaaaaaa

SEQ ID NO: 183 - protein, 476 aa, Homo sapiens
MAIKFLEVIKPFCVILPEIQKPERKIQFKEKVLWTAITLFIFLVCCQIPLFGIMSSDSADPFYWMRVILASNRGTLMELGISPIVTSGLIMQLLAGAKIIEVGDTPKDRALFNGAQKLFGMIITIGQSIVYVMTGMYGDPSEMGAGICLLITIQLFVAGLIVLLLDELLQKGYGLGSGISLFIATNICETIVWKAFSPTTVNTGRGMEFEGAIIALFHLLATRTDKVRALREAFYRQNLPNLMNLIATIFVFAVVIYFQGFRVDLPIKSARYRGQYNTYPIKLFYTSNIPIILQSALVSNLYVISQMLSARFSGNLLVSLLGTWSDTSSGGPARAYPVGGLCYYLSPPESFGSVLEDPVHAVVYIVFMLGSCAFFSKTWIEVSGSSAKDVAKQLKEQQMVMRGHRETSMVHELNRYIPTAAAFGGLCIGALSVLADFLGAIGSGTGILLAVTIIYQYFEIFVKEQSEVGSMGALLF

SEQ ID NO: 184 - DNA, 3598 bp, Homo sapiens
gtggtgggctagaccagtttcgcgcggccgctcgccgtcccccgcccagtcgtactcggcgccccagctcggtgctgccgccatcttcttggaggacaggaggagaggcgaaggctccccctccccgtgatcgctccgcactcccgccaccacctgccctcccgcgaccgcctctctcctcctcagtgggcacttgtctccttctaacaaacggccttccccccactccagttacccaccgcaaggcgaagattctcattacctgttccactcttataagcataagaaaaccgagctcataagcatacagaaactgctgtaaaagaagaagttgtgggtatttttttttttttttttgtctggaggaatggggacaccaaaactcatttggcagcagaggtgagacgaagcttcacaaaagatgtctaagcaacagccaactcagtttataaatccagaaacacctggctatgttggatttgcaaacctccccaatcaagttcaccgaaaatcagtgaaaaaaggttttgagttcacactgatggtggtcggtgaatcaggtctaggaaaatcgactctcataaacagcctattcctaactgatctgtacccagaaagagtcatacctggagcagcagaaaaaattgaaagaactgtccagattgaggcttcaactgttgaaattgaagagcgaggggtcaagctacgcctgacagtggtagatacccctggctatggtgacgctatcaactgcagagattgttttaagacaattatctcctatattgatgagcaatttgagaggtacctgcatgacgagagcggcttgaacaggcggcacatcattgataatagggtgcattgttgcttttactttatttcaccttttggacatggacttaagcccttagatgtggcgtttatgaaggcaatacacaacaaggtgaatattgtgcctgtcattgcaaaagctgacactctcaccctgaaggaacgggagcggctgaagaaaaggattctggatgaaattgaagaacataacatcaaaatctatcacttacctgatgcagaatcagatgaagatgaagattttaaagagcagactagacttctcaaggctagcatcccattctctgtggttggatccaatcagttgattgaagccaaaggaaagaaggtcagaggccgcctctacccctggggtgttgtggaagtggagaacccagagcacaatgactttctgaagctgagaaccatgctcatcacccacatgcaggatctccaggaggtgacccaggaccttcattatgaaaacttccgttctgagagactcaagagaggcggcaggaaagtggagaatgaggacatgaataaagaccagatcttgctggaaaaagaagctgagctccgccgcatgcaagagatgattgcaaggatgcaggcgcagatgcagatgcagatgcagggcggggatggcgatggcggggctctcgggcaccacgtgtaaggtgatgtgcacatatcaagaagtcagagaaaacactttcctggataaaaaagaaaacattccagatgcatgatccagctgtgtgttttcaatccttgggagggtgccatccacattttaacagtacctgtgcctgagaatttaatttttaaaagactttgatgtgtttttgtatgaagtacttttaacgtatgtatttcattgctgtgtcacactctgtgttttgtgaggtgaatgtcttccttttctttctccctaaccactaatgttagaattgatttccaagaatcggcatgtatacttaatactgaatttctttgatttaactgacttaacaactgactaaccattgatgagcactcctgatttttatctagaacattcagatttaccataatgttccttagtggtagaggtgtgtgcctagtgatgtagaaagatacactgacttggtgcaaggccatctgcttaccacatcacaccacttggagatctttgcttccttgcttttatgtttgtacacaacacctaaaaccagttttgctgctataattctatactgttgattcgtctgcgattttatctgttaaccaaataaaacataatagaatttcctaatgagatatatctttatacttaaacagcttttttagaggtgagttttaaagaagtctcttaattctgatgctaggttgtttttaaaaccactatgcaaagaactcaccacaagccaccttttgtagtgttctccactaatactggttatcctgtgctacagagaaaatcaaagcagtcataagctccagttttcgtattgcaaataagactcttacctacaaaatgagattcagtgaactaatttggtttttactcaaccaaattaaaaatttttttaaggaaaattagcagttggtctattcagaatcaaacctttttatattttatactgcactttagtgtattttctgtcactgtaggtatagaagatctgcctcccctgtggaaattggggtctgttggtgggcgtgcccctgaagcctggcttgggttgaaaagtgttcccgccctaaggccttggtgccctgaacctctgatgcctaccgggttctcctgatttgagtttcctttaaatactccctttttgagtaattttctgatgggaggaaagtagcagtcatcatctttttgtgtgcaggctgtctcatttatttttagccattgtcgtttcattcattttgtgtaatataaaccgtgtgtcatgtcaaagtgaaagacatttcaaatctgtagcataggctagtgggcaggtccgcacagtcgaagccacacctggtctgttttctgtgcactgtagccttagtgtcacctttcttcttgtgtctccttatggtacactccagcggttgccttttttatcatttctactgaagttgggaaattcaaccccagaaattgacagatgaaaggagacaatggttgtgtagggagatggagaaaatgcttaatctgaggatgagacagggttttttcatttttgtgggggctagaaaaaacataaaatgaggcagttaaataataatagttaatgaaggtgtgctacagaaaataatctggtgttcttgctaactttgcccttcactgttgcttaattgtgaacagccaaaagctatatgttatggcttattgtgtgaaggtaactaagaagtggtgttccatgacttcagagtacatccatgcggagtccattatttgagtttgacatttaataactttgctggaaaatctgtaaaaaagaaaaacaagtttgctagtgactaagccccgcatatgtgagtgaaagtacttcaggcacgctgcctcctggtaacagctatgcagggagggaggacccacactgctacacttctgatcccctttggttttactacccaaatctaaatagatacttttgataatagataactgctcttttactaagacatagtctctacctatagaaatgtattttgaaaacacttattttacacagcaattttgtatccatttaaactaaccttttatcaataaagcactattgtttagatattaaaa

SEQ ID NO: 185 - protein, 361 aa, Homo sapiens
MSKQQPTQFINPETPGYVGFANLPNQVHRKSVKKGFEFTLMVVGESGLGKSTLINSLFLTDLYPERVIPGAAEKIERTVQIEASTVEIEERGVKLRLTVVDTPGYGDAINCRDCFKTIISYIDEQFERYLHDESGLNRRHIIDNRVHCCFYFISPFGHGLKPLDVAFMKAIHNKVNIVPVIAKADTLTLKERERLKKRILDEIEEHNIKIYHLPDAESDEDEDFKEQTRLLKASIPFSVVGSNQLIEAKGKKVRGRLYPWGVVEVENPEHNDFLKLRTMLITHMQDLQEVTQDLHYENFRSERLKRGGRKVENEDMNKDQILLEKEAELRRMQEMIARMQAQMQMQMQGGDGDGGALGHHV

SEQ ID NO: 186 - DNA, 3396 bp, Homo sapiens
aatccgcctgcgcgctgggcggggcggggcgggctggggcgggctgtgagcggaccgcgagcgctgggcgggtccgcggcgcggtcggtcggcgcctgttctcgggctgtttggcggaggcttggaatagttaaatgactttggtcttgtccaaggttagatggagttcaactctaacgtcaagtcttggtccttttcattgacgaagcttcacaaaagatgtctaagcaacagccaactcagtttataaatccagaaacacctggctatgttggatttgcaaacctccccaatcaagttcaccgaaaatcagtgaaaaaaggttttgagttcacactgatggtggtcggtgaatcaggtctaggaaaatcgactctcataaacagcctattcctaactgatctgtacccagaaagagtcatacctggagcagcagaaaaaattgaaagaactgtccagattgaggcttcaactgttgaaattgaagagcgaggggtcaagctacgcctgacagtggtagatacccctggctatggtgacgctatcaactgcagagattgttttaagacaattatctcctatattgatgagcaatttgagaggtacctgcatgacgagagcggcttgaacaggcggcacatcattgataatagggtgcattgttgcttttactttatttcaccttttggacatggacttaagcccttagatgtggcgtttatgaaggcaatacacaacaaggtgaatattgtgcctgtcattgcaaaagctgacactctcaccctgaaggaacgggagcggctgaagaaaaggattctggatgaaattgaagaacataacatcaaaatctatcacttacctgatgcagaatcagatgaagatgaagattttaaagagcagactagacttctcaaggctagcatcccattctctgtggttggatccaatcagttgattgaagccaaaggaaagaaggtcagaggccgcctctacccctggggtgttgtggaagtggagaacccagagcacaatgactttctgaagctgagaaccatgctcatcacccacatgcaggatctccaggaggtgacccaggaccttcattatgaaaacttccgttctgagagactcaagagaggcggcaggaaagtggagaatgaggacatgaataaagaccagatcttgctggaaaaagaagctgagctccgccgcatgcaagagatgattgcaaggatgcaggcgcagatgcagatgcagatgcagggcggggatggcgatggcggggctctcgggcaccacgtgtaaggtgatgtgcacatatcaagaagtcagagaaaacactttcctggataaaaaagaaaacattccagatgcatgatccagctgtgtgttttcaatccttgggagggtgccatccacattttaacagtacctgtgcctgagaatttaatttttaaaagactttgatgtgtttttgtatgaagtacttttaacgtatgtatttcattgctgtgtcacactctgtgttttgtgaggtgaatgtcttccttttctttctccctaaccactaatgttagaattgatttccaagaatcggcatgtatacttaatactgaatttctttgatttaactgacttaacaactgactaaccattgatgagcactcctgatttttatctagaacattcagatttaccataatgttccttagtggtagaggtgtgtgcctagtgatgtagaaagatacactgacttggtgcaaggccatctgcttaccacatcacaccacttggagatctttgcttccttgcttttatgtttgtacacaacacctaaaaccagttttgctgctataattctatactgttgattcgtctgcgattttatctgttaaccaaataaaacataatagaatttcctaatgagatatatctttatacttaaacagcttttttagaggtgagttttaaagaagtctcttaattctgatgctaggttgtttttaaaaccactatgcaaagaactcaccacaagccaccttttgtagtgttctccactaatactggttatcctgtgctacagagaaaatcaaagcagtcataagctccagttttcgtattgcaaataagactcttacctacaaaatgagattcagtgaactaatttggtttttactcaaccaaattaaaaatttttttaaggaaaattagcagttggtctattcagaatcaaacctttttatattttatactgcactttagtgtattttctgtcactgtaggtatagaagatctgcctcccctgtggaaattggggtctgttggtgggcgtgcccctgaagcctggcttgggttgaaaagtgttcccgccctaaggccttggtgccctgaacctctgatgcctaccgggttctcctgatttgagtttcctttaaatactccctttttgagtaattttctgatgggaggaaagtagcagtcatcatctttttgtgtgcaggctgtctcatttatttttagccattgtcgtttcattcattttgtgtaatataaaccgtgtgtcatgtcaaagtgaaagacatttcaaatctgtagcataggctagtgggcaggtccgcacagtcgaagccacacctggtctgttttctgtgcactgtagccttagtgtcacctttcttcttgtgtctccttatggtacactccagcggttgccttttttatcatttctactgaagttgggaaattcaaccccagaaattgacagatgaaaggagacaatggttgtgtagggagatggagaaaatgcttaatctgaggatgagacagggttttttcatttttgtgggggctagaaaaaacataaaatgaggcagttaaataataatagttaatgaaggtgtgctacagaaaataatctggtgttcttgctaactttgcccttcactgttgcttaattgtgaacagccaaaagctatatgttatggcttattgtgtgaaggtaactaagaagtggtgttccatgacttcagagtacatccatgcggagtccattatttgagtttgacatttaataactttgctggaaaatctgtaaaaaagaaaaacaagtttgctagtgactaagccccgcatatgtgagtgaaagtacttcaggcacgctgcctcctggtaacagctatgcagggagggaggacccacactgctacacttctgatcccctttggttttactacccaaatctaaatagatacttttgataatagataactgctcttttactaagacatagtctctacctatagaaatgtattttgaaaacacttattttacacagcaattttgtatccatttaaactaaccttttatcaataaagcactattgtttagatattaaaa

SEQ ID NO: 187 - protein, 361 aa, Homo sapiens; identical to SEQ ID NO: 185

SEQ ID NO: 188 - DNA, 3311 bp, Homo sapiens
aatccgcctgcgcgctgggcggggcggggcgggctggggcgggctgtgagcggaccgcgagcgctgggcgggtccgcggcgcggtcggtcggcgcctgttctcgggctgtttggcggacgaagcttcacaaaagatgtctaagcaacagccaactcagtttataaatccagaaacacctggctatgttggatttgcaaacctccccaatcaagttcaccgaaaatcagtgaaaaaaggttttgagttcacactgatggtggtcggtgaatcaggtctaggaaaatcgactctcataaacagcctattcctaactgatctgtacccagaaagagtcatacctggagcagcagaaaaaattgaaagaactgtccagattgaggcttcaactgttgaaattgaagagcgaggggtcaagctacgcctgacagtggtagatacccctggctatggtgacgctatcaactgcagagattgttttaagacaattatctcctatattgatgagcaatttgagaggtacctgcatgacgagagcggcttgaacaggcggcacatcattgataatagggtgcattgttgcttttactttatttcaccttttggacatggacttaagcccttagatgtggcgtttatgaaggcaatacacaacaaggtgaatattgtgcctgtcattgcaaaagctgacactctcaccctgaaggaacgggagcggctgaagaaaaggattctggatgaaattgaagaacataacatcaaaatctatcacttacctgatgcagaatcagatgaagatgaagattttaaagagcagactagacttctcaaggctagcatcccattctctgtggttggatccaatcagttgattgaagccaaaggaaagaaggtcagaggccgcctctacccctggggtgttgtggaagtggagaacccagagcacaatgactttctgaagctgagaaccatgctcatcacccacatgcaggatctccaggaggtgacccaggaccttcattatgaaaacttccgttctgagagactcaagagaggcggcaggaaagtggagaatgaggacatgaataaagaccagatcttgctggaaaaagaagctgagctccgccgcatgcaagagatgattgcaaggatgcaggcgcagatgcagatgcagatgcagggcggggatggcgatggcggggctctcgggcaccacgtgtaaggtgatgtgcacatatcaagaagtcagagaaaacactttcctggataaaaaagaaaacattccagatgcatgatccagctgtgtgttttcaatccttgggagggtgccatccacattttaacagtacctgtgcctgagaatttaatttttaaaagactttgatgtgtttttgtatgaagtacttttaacgtatgtatttcattgctgtgtcacactctgtgttttgtgaggtgaatgtcttccttttctttctccctaaccactaatgttagaattgatttccaagaatcggcatgtatacttaatactgaatttctttgatttaactgacttaacaactgactaaccattgatgagcactcctgatttttatctagaacattcagatttaccataatgttccttagtggtagaggtgtgtgcctagtgatgtagaaagatacactgacttggtgcaaggccatctgcttaccacatcacaccacttggagatctttgcttccttgcttttatgtttgtacacaacacctaaaaccagttttgctgctataattctatactgttgattcgtctgcgattttatctgttaaccaaataaaacataatagaatttcctaatgagatatatctttatacttaaacagcttttttagaggtgagttttaaagaagtctcttaattctgatgctaggttgtttttaaaaccactatgcaaagaactcaccacaagccaccttttgtagtgttctccactaatactggttatcctgtgctacagagaaaatcaaagcagtcataagctccagttttcgtattgcaaataagactcttacctacaaaatgagattcagtgaactaatttggtttttactcaaccaaattaaaaatttttttaaggaaaattagcagttggtctattcagaatcaaacctttttatattttatactgcactttagtgtattttctgtcactgtaggtatagaagatctgcctcccctgtggaaattggggtctgttggtgggcgtgcccctgaagcctggcttgggttgaaaagtgttcccgccctaaggccttggtgccctgaacctctgatgcctaccgggttctcctgatttgagtttcctttaaatactccctttttgagtaattttctgatgggaggaaagtagcagtcatcatctttttgtgtgcaggctgtctcatttatttttagccattgtcgtttcattcattttgtgtaatataaaccgtgtgtcatgtcaaagtgaaagacatttcaaatctgtagcataggctagtgggcaggtccgcacagtcgaagccacacctggtctgttttctgtgcactgtagccttagtgtcacctttcttcttgtgtctccttatggtacactccagcggttgccttttttatcatttctactgaagttgggaaattcaaccccagaaattgacagatgaaaggagacaatggttgtgtagggagatggagaaaatgcttaatctgaggatgagacagggttttttcatttttgtgggggctagaaaaaacataaaatgaggcagttaaataataatagttaatgaaggtgtgctacagaaaataatctggtgttcttgctaactttgcccttcactgttgcttaattgtgaacagccaaaagctatatgttatggcttattgtgtgaaggtaactaagaagtggtgttccatgacttcagagtacatccatgcggagtccattatttgagtttgacatttaataactttgctggaaaatctgtaaaaaagaaaaacaagtttgctagtgactaagccccgcatatgtgagtgaaagtacttcaggcacgctgcctcctggtaacagctatgcagggagggaggacccacactgctacacttctgatcccctttggttttactacccaaatctaaatagatacttttgataatagataactgctcttttactaagacatagtctctacctatagaaatgtattttgaaaacacttattttacacagcaattttgtatccatttaaactaaccttttatcaataaagcactattgtttagatattaaaa

SEQ ID NO: 189 - protein, 361 aa, Homo sapiens; identical to SEQ ID NO: 185

SEQ ID NO: 190 - DNA, 3497 bp, Homo sapiens
gtggtgggctagaccagtttcgcgcggccgctcgccgtcccccgcccagtcgtactcggcgccccagctcggtgctgccgccatcttcttggaggacaggaggagaggcgaaggctccccctccccgtgatcgctccgcactcccgccaccacctgccctcccgcgaccgcctctctcctcctcagtgggcacttgtctccttctaacaaacggccttccccccactccagttacccaccgcaaggcgaagattctcattacctgttccactcttataagcataagaaaaccgagctcataagacgaagcttcacaaaagatgtctaagcaacagccaactcagtttataaatccagaaacacctggctatgttggatttgcaaacctccccaatcaagttcaccgaaaatcagtgaaaaaaggttttgagttcacactgatggtggtcggtgaatcaggtctaggaaaatcgactctcataaacagcctattcctaactgatctgtacccagaaagagtcatacctggagcagcagaaaaaattgaaagaactgtccagattgaggcttcaactgttgaaattgaagagcgaggggtcaagctacgcctgacagtggtagatacccctggctatggtgacgctatcaactgcagagattgttttaagacaattatctcctatattgatgagcaatttgagaggtacctgcatgacgagagcggcttgaacaggcggcacatcattgataatagggtgcattgttgcttttactttatttcaccttttggacatggacttaagcccttagatgtggcgtttatgaaggcaatacacaacaaggtgaatattgtgcctgtcattgcaaaagctgacactctcaccctgaaggaacgggagcggctgaagaaaaggattctggatgaaattgaagaacataacatcaaaatctatcacttacctgatgcagaatcagatgaagatgaagattttaaagagcagactagacttctcaaggctagcatcccattctctgtggttggatccaatcagttgattgaagccaaaggaaagaaggtcagaggccgcctctacccctggggtgttgtggaagtggagaacccagagcacaatgactttctgaagctgagaaccatgctcatcacccacatgcaggatctccaggaggtgacccaggaccttcattatgaaaacttccgttctgagagactcaagagaggcggcaggaaagtggagaatgaggacatgaataaagaccagatcttgctggaaaaagaagctgagctccgccgcatgcaagagatgattgcaaggatgcaggcgcagatgcagatgcagatgcagggcggggatggcgatggcggggctctcgggcaccacgtgtaaggtgatgtgcacatatcaagaagtcagagaaaacactttcctggataaaaaagaaaacattccagatgcatgatccagctgtgtgttttcaatccttgggagggtgccatccacattttaacagtacctgtgcctgagaatttaatttttaaaagactttgatgtgtttttgtatgaagtacttttaacgtatgtatttcattgctgtgtcacactctgtgttttgtgaggtgaatgtcttccttttctttctccctaaccactaatgttagaattgatttccaagaatcggcatgtatacttaatactgaatttctttgatttaactgacttaacaactgactaaccattgatgagcactcctgatttttatctagaacattcagatttaccataatgttccttagtggtagaggtgtgtgcctagtgatgtagaaagatacactgacttggtgcaaggccatctgcttaccacatcacaccacttggagatctttgcttccttgcttttatgtttgtacacaacacctaaaaccagttttgctgctataattctatactgttgattcgtctgcgattttatctgttaaccaaataaaacataatagaatttcctaatgagatatatctttatacttaaacagcttttttagaggtgagttttaaagaagtctcttaattctgatgctaggttgtttttaaaaccactatgcaaagaactcaccacaagccaccttttgtagtgttctccactaatactggttatcctgtgctacagagaaaatcaaagcagtcataagctccagttttcgtattgcaaataagactcttacctacaaaatgagattcagtgaactaatttggtttttactcaaccaaattaaaaatttttttaaggaaaattagcagttggtctattcagaatcaaacctttttatattttatactgcactttagtgtattttctgtcactgtaggtatagaagatctgcctcccctgtggaaattggggtctgttggtgggcgtgcccctgaagcctggcttgggttgaaaagtgttcccgccctaaggccttggtgccctgaacctctgatgcctaccgggttctcctgatttgagtttcctttaaatactccctttttgagtaattttctgatgggaggaaagtagcagtcatcatctttttgtgtgcaggctgtctcatttatttttagccattgtcgtttcattcattttgtgtaatataaaccgtgtgtcatgtcaaagtgaaagacatttcaaatctgtagcataggctagtgggcaggtccgcacagtcgaagccacacctggtctgttttctgtgcactgtagccttagtgtcacctttcttcttgtgtctccttatggtacactccagcggttgccttttttatcatttctactgaagttgggaaattcaaccccagaaattgacagatgaaaggagacaatggttgtgtagggagatggagaaaatgcttaatctgaggatgagacagggttttttcatttttgtgggggctagaaaaaacataaaatgaggcagttaaataataatagttaatgaaggtgtgctacagaaaataatctggtgttcttgctaactttgcccttcactgttgcttaattgtgaacagccaaaagctatatgttatggcttattgtgtgaaggtaactaagaagtggtgttccatgacttcagagtacatccatgcggagtccattatttgagtttgacatttaataactttgctggaaaatctgtaaaaaagaaaaacaagtttgctagtgactaagccccgcatatgtgagtgaaagtacttcaggcacgctgcctcctggtaacagctatgcagggagggaggacccacactgctacacttctgatcccctttggttttactacccaaatctaaatagatacttttgataatagataactgctcttttactaagacatagtctctacctatagaaatgtattttgaaaacacttattttacacagcaattttgtatccatttaaactaaccttttatcaataaagcactattgtttagatattaaaa

SEQ ID NO: 191 - protein, 361 aa, Homo sapiens; identical to SEQ ID NO: 185

SEQ ID NO: 192 - DNA, 4167 bp, Homo sapiens
agcgggagtccgcggcgagcgcagcagcagggccgggtcctgcgcctcgggggtcggcgtccaggctcggagcgcggcacggagacggcggcagcgctggactaggtggcaggccctgcatcatggaaactctttctaatgcaagtggtacttttgccatacgccttttaaagatactgtgtcaagataacccttcgcacaacgtgttctgttctcctgtgagcatctcctctgccctggccatggttctcctaggggcaaagggaaacaccgcaacccagatggcccaggcactgtctttaaacacagaggaagacattcatcgggctttccagtcgcttctcactgaagtgaacaaggctggcacacagtacctgctgagaacggccaacaggctctttggagagaaaacttgtcagttcctctcaacgtttaaggaatcctgtcttcaattctaccatgctgagctgaaggagctttcctttatcagagctgcagaagagtccaggaaacacatcaacacctgggtctcaaaaaagaccgaaggtaaaattgaagagttgttgccgggtagctcaattgatgcagaaaccaggctggttcttgtcaatgccatctacttcaaaggaaagtggaatgaaccgtttgacgaaacatacacaagggaaatgccctttaaaataaaccaggaggagcaaaggccagtgcagatgatgtatcaggaggccacgtttaagctcgcccacgtgggcgaggtgcgcgcgcagctgctggagctgccctacgccaggaaggagctgagcctgctggtgctgctgcctgacgacggcgtggagctcagcacggtggaaaaaagtctcacttttgagaaactcacagcctggaccaagccagactgtatgaagagtactgaggttgaagttctccttccaaaatttaaactacaagaggattatgacatggaatctgtgcttcggcatttgggaattgttgatgccttccaacagggcaaggctgacttgtcggcaatgtcagcggagagagacctgtgtctgtccaagttcgtgcacaagagttttgtggaggtgaatgaagaaggcaccgaggcagcggcagcgtcgagctgctttgtagttgcagagtgctgcatggaatctggccccaggttctgtgctgaccaccctttccttttcttcatcaggcacaacagagccaacagcattctgttctgtggcaggttctcatcgccataaagggtgcacttaccgtgcactcggccatttccctcttcctgtgtccccagatccccactacagctccaagaggatgggcctagaaagccaagtgcaaagatgagggcagattctttacctgtctgccctcatgatttgccagcatgaattcatgatgctccacactcgcttatgctacttaatcagaatcttgagaaaatagaccataatgattccctgttgtattaaaattgcagtccaaatcccataggatggcaagcaaagttcttctagaattccacatgcaattcactctggcgaccctgtgctttcctgacactgcgaatacattccttaacccgctgcctcagtggtaataaatggtgctagatattgctactattttatagatttcctggtgcttagccttataaaaaaggttgtaaaatgtacatttatattttatcttttttttttttttttttctgagacgcagtctggctctctgtcgcccaggctggagtgcagtggctcgatctcggctcactgcaagctccgcctcccgggttcacgccattctcctgcctcagcctcccgagtagctgggactacaggcgcccgccaccacgcccggctaattttttgtatttttagtagagacggggtttcaccgtgttagccaggatggtgtcgatctcctgacctcgtgatccacccgcctcggcctcccaaagtgctgggattacaggcttgagccaccgcgcccggctatattttatcttttatctttttctttgacatttaccaatcaccaagcatgcaccaaacactgctttaggcactggggacacaaaggggacagagccatcctcctttgacacctggtcttcagttctgtgcccaacgtatatagttttgacaatgaccaggttggactgtttaatgtctttcaacttaccacgtaatcctcttgtagggatcacatctttctttatgatattgtatttctctacctctaacagtaaaaattccattcaacccttaaagctcacttcaaattcttctttgagaagtttttcctttctccgcaaccagatgtacatatttgaactctctttgtacttggagggcacttctttcgtggtagttcttttatttttattaatctctgtatccttagatagtcctccaacaaccaaaggttgggactctgtcttacatatctgggtgcccctcatagtgcagtaataagtaagttgattatatacgagctatgtaacttatattttttaatggttggatatcactgagtttttttttttaagaatttttttattgaggtaaacttcacataacataaaattaactattttaaagtgagaagttcagtgccacttagtattgttaacaatgttgcataaccaccacctttatttaaagttccaaaaaaaatgttctcctctaaaaggaaaccccatcccattaagcagatactctccattccttccttcctccagcccccagcaaccaccaatctgctttctgtctctatggatttatctattcttgctattttatataaattgaattgtatgagaccttttgtgtctggcttctttcacttagtacaagtttttgagatttatttacatagtagcatgtatcaacacttcatttttatggccaaataaaattgtattatgtgtttatagcacaatttatttatccactcattcattgatggactttgggttgtttctgacttttggctattgggaatagtgctgctatgaatgtttgtgtacctgtatttgtttgaatgcctattttgcattctcttgggtatatatctaggagtggaactgctgggtcatatgttaattctatgtttagctttttgaggaacagacaaactgttttccacagcagttgaaccattccacattcccaccagcaatgtatgagaattccaatttctgtccacttcctcaccaacacttattattttccttttcctttttttaaaaaaaataagttatggccatcttagtgggtgtgaagtggtatctcattgtgttttttatttgcatttcctatgtaatgagctagaaactaaagtacaaactagatgggacatccagtccctttgatagataatgctgagtaaaaaatgagatgaaagacatttgtttgtttttagaacacgagtgacagtttgttaaaaagctttagaggaggaatgaaaacaaagtgaagtacacttagaaaagggccaagtggacatcttggatgtcaagtgcctagttcagtatcttttttttttttttttttttttttgagacagtgcctcactctgtcacccaggctggagtgtagtggcatgatctgggctcactgcaacctcctcctcctggattcaagcaattctcttgcttcagcctcccaagtagctgagactacaagcacccaccatcacacccagctaattttgtatttttcagtagagacggggtttcgccacattggccgtgttggtcttgaactcctggcctcaagcgatccgcctacctcagcctcccaaagtgctaggattacaggcataagccactgagcccagccctagttcagtatcttttatgtaaattacaaacatctgcaacattatgtatcatatgcagatacttattgcatttcttttattagtggtgaaagtgttctatgcatttattggctcttgaatttcctcatctatgaattgtcattcatacacctacttttctgcttcgtttttacatatgtctttgcctattaaagatattatccctctgttttatattttctctcattcttgtattgccttttaaattttgttatgatgtttcattaataaacagtgttttgttttcctctataatcaaaaaaaaaaaaaaaaaaa

SEQ ID NO: 193 - protein, 376 aa, Homo sapiens
METLSNASGTFAIRLLKILCQDNPSHNVFCSPVSISSALAMVLLGAKGNTATQMAQALSLNTEEDIHRAFQSLLTEVNKAGTQYLLRTANRLFGEKTCQFLSTFKESCLQFYHAELKELSFIRAAEESRKHINTWVSKKTEGKIEELLPGSSIDAETRLVLVNAIYFKGKWNEPFDETYTREMPFKINQEEQRPVQMMYQEATFKLAHVGEVRAQLLELPYARKELSLLVLLPDDGVELSTVEKSLTFEKLTAWTKPDCMKSTEVEVLLPKFKLQEDYDMESVLRHLGIVDAFQQGKADLSAMSAERDLCLSKFVHKSFVEVNEEGTEAAAASSCFVVAECCMESGPRFCADHPFLFFIRHNRANSILFCGRFSSP

SEQ ID NO: 194 - DNA, 5142 bp, Homo sapiens
taggcgccattttcgagtgaaggacccggagccgaaacaccggtaggagcggggaggtgggtactacacaaccgtctccagccttggtctgagtggactgtcctgcagcgaccatgccccgtaaaggcacccagccctccactgcccggcgcagagaggaagggccgccgccgccgtcccctgacggcgccagcagcgacgcggagcctgagccgccgtccggccgcacggagagcccagccaccgccgcagagactgcaagtgaggaacttgataatagaagtttagaagagattttgaacagcattcctcctcccccgcctccagcaatgaccaatgaagctggagctcctcggcttatgataactcatattgtaaaccagaacttcaaatcctatgctggggagaaaattctgggacctttccataagcgcttttcctgtattatcgggccaaatggcagtggcaaatccaatgttattgattctatgctttttgtgtttggctatcgagcacaaaaaataagatctaaaaaactctcagtattaatacataattctgatgaacacaaggacattcagagttgtacagtagaagttcattttcaaaagataattgataaggaaggggatgattatgaagtcattcctaacagtaatttctatgtatccagaacggcctgcagagataatacttctgtctatcacataagtggaaagaaaaagacatttaaggatgttggaaatcttcttcgaagccatggaattgacttggaccataatagatttttaattttacagggtgaagttgaacaaattgctatgatgaaaccaaaaggccagactgaacacgatgagggtatgcttgaatatttagaagatataattggttgtggacggctaaatgaacctattaaagtcttgtgtcggagagttgaaatattaaatgaacacagaggagagaagttaaacagggtaaagatggtggaaaaggaaaaggatgccttagaaggagagaaaaacatagctatcgaatttcttaccttggaaaatgaaatatttagaaaaaagaatcatgtttgtcaatattatatttatgagttgcagaaacgaattgctgaaatggaaactcaaaaggaaaaaattcatgaagataccaaagaaattaatgagaagagcaatatactatcaaatgaaatgaaagctaagaataaagatgtaaaagatacagaaaagaaactgaataaaattacaaaatttattgaggagaataaagaaaaatttacacagctagatttggaagatgttcaagttagagaaaagttaaaacatgccacgagtaaagccaaaaaactggagaaacaacttcaaaaagataaagaaaaggttgaagaatttaaaagtatacctgccaagagtaacaatatcattaatgaaacaacaaccagaaacaatgccctcgagaaggaaaaagagaaagaagaaaaaaaattaaaggaagttatggatagccttaaacaggaaacacaagggcttcagaaagaaaaagaaagtcgagagaaagaacttatgggtttcagcaaatcggtaaatgaagcacgttcaaagatggatgtagcccagtcagaacttgatatctatctcagtcgtcataatactgcagtgtctcaattaactaaggctaaggaagctctaattgcagcttctgagactctcaaagaaaggaaagctgcaatcagagatatagaaggaaaactccctcaaactgaacaagaattaaaggagaaagaaaaagaacttcaaaaacttacacaagaagaaacaaactttaaaagtttggttcatgatctctttcaaaaagttgaagaagcaaagagctcattagcaatgaatcgaagtagggggaaagtccttgatgcaataattcaagaaaaaaaatctggcaggattccaggaatatatggaagattgggggacttaggagccattgatgaaaaatacgacgtggctatatcatcctgttgtcatgcactggactacattgttgttgattctattgatatagcccaagaatgtgtaaacttccttaaaagacaaaatattggagttgcaacctttataggtttagataagatggctgtatgggcgaaaaagatgaccgaaattcaaactcctgaaaatactcctcgtttatttgatttagtaaaagtaaaagatgagaaaattcgccaagctttttattttgctttacgagataccttagtagctgacaacttggatcaagccacaagagtagcatatcaaaaagatagaagatggagagtggtaactttacagggacaaatcatagaacagtcaggtacaatgactggtggtggaagcaaagtaatgaaaggaagaatgggttcctcacttgttattgaaatctctgaagaagaggtaaacaaaatggaatcacagttgcaaaacgactctaaaaaagcaatgcaaatccaagaacagaaagtacaacttgaagaaagagtagttaagttacggcatagtgaacgagaaatgaggaacacactagaaaaatttactgcaagcatccagcgtttaatagagcaagaagaatatttgaatgtccaagttaaggaacttgaagctaatgtacttgctacagcccctgacaaaaaaaagcagaaattgctagaagaaaacgttagtgctttcaaaacagaatatgatgctgtggctgagaaagctggtaaagtagaagctgaggttaaacgcttacacaataccatcgtagaaatcaataatcataaactcaaggcccaacaagacaaacttgataaaataaataagcaattagatgaatgtgcttctgctattactaaagcccaagtagcaatcaagactgctgacagaaaccttcaaaaggcacaagactctgtcttgcgtacagagaaagaaataaaagatactgagaaagaggtggatgacctaacagcagagctgaaaagtcttgaggacaaagcagcagaggtcgtaaagaatacaaatgctgcagaggaatccttaccagagatccagaaagaacatcgcaatctgcttcaagaattaaaagttattcaagaaaatgaacatgctcttcaaaaagatgcacttagtattaagttgaaacttgaacaaatagatggtcacattgctgaacataattctaaaataaaatattggcacaaagagatttcaaaaatatcactgcatcctatagaagataatcctattgaagagatttcggttctaagcccagaggatcttgaagcgatcaagaatccagattctataacaaatcaaattgcacttttggaagcccggtgtcatgaaatgaaaccaaacctcggtgccatcgcagagtataaaaagaaggaagaattgtatttgcaacgggtagcagaattggacaaaattacttatgaaagagacagttttagacaggcatatgaagatcttcggaaacaaaggcttaatgaatttatggcaggtttttatataataacaaataaattaaaggaaaattaccaaatgcttactttgggaggggacgccgaactcgagcttgtagacagcttggatcctttctctgaaggaatcatgttcagtgttcgaccacctaagaaaagttggaaaaagatcttcaacctttcgggaggagagaaaacacttagttcattggctttagtatttgctcttcaccactacaagcccactcccctttacttcatggatgagattgatgcagcccttgattttaaaaatgtgtccattgttgcattttatatatatgaacaaacaaaaaatgcacagttcataataatttctcttcgaaataatatgtttgagatttcggatagacttattggaatttacaagacatacaacataacaaaaagtgttgctgtaaatccaaaagaaattgcatctaagggactttgttgaactttatgctgaagattcttcaagttgattcagtgtattactgatttttttctatttgtaaaggattatgagttgtataaaatacatactccctaaactagatcatgaaactggtttctgttttatgcagttgtcatttgtaaagtctaataaaatattctctataattgcttctagattacaaaaatatgacaatcttgtaagtagcagactatggagaaaaatgagttacctggagggtcaggtaacttgccaaactaaaaagtatgttagttgaggcaaagtcctaagcaaggttgtgctatcaaggctcagcataccttcgtgggcctttgatttaccaacactggaaatgcctgccaactaatcttggatagattctttaaggcattccacttagcttgccagttgagacaatcaccacagttattacccaaatactatgaacatatttttgtaaaccagtcattctgaattatagtgatgagaatttaaatatatgcttttctagaatttgatgtttgaccatttatgacttaattaccagagagccagtaaattaggacagtgtttcaacaagcctaggctatctcgtaagttgaaaaatatcccactatagttgcttcatgagtatgaagtaagatggcctctgatttacactggttcaatttacaaattttcaactttatgataggtttatccgggtactaaatgcatttcaacttgatagtttcaacttatgataggtttaccaggatgtagtcccactgttgaggagcatctatttaggggttaattactttagtaataagtggaaagtaagataccttgagtaatgtttgcctataaaattgtcagcgtatttttacactattggctcaagaatgttataatgctaagggacataagttggcaaccacttggtttttggaaggactttcggtattgtattagaagtctgccctagctgttaaatttctgggtatttatcctaaggaattaattaaagagttaattgttcctttcttcagtgggccattgttttagatatttaaaaaatccaacagtttctatcataatgtaactgtaaaaatgtaaacacattattagcatggacttttaaataaagatttaaagaaagcaaaaaaaaaaaaaaaaaaaa

SEQ ID NO: 195 - protein, 1288 aa, Homo sapiens
MPRKGTQPSTARRREEGPPPPSPDGASSDAEPEPPSGRTESPATAAETASEELDNRSLEEILNSIPPPPPPAMTNEAGAPRLMITHIVNQNFKSYAGEKILGPFHKRFSCIIGPNGSGKSNVIDSMLFVFGYRAQKIRSKKLSVLIHNSDEHKDIQSCTVEVHFQKIIDKEGDDYEVIPNSNFYVSRTACRDNTSVYHISGKKKTFKDVGNLLRSHGIDLDHNRFLILQGEVEQIAMMKPKGQTEHDEGMLEYLEDIIGCGRLNEPIKVLCRRVEILNEHRGEKLNRVKMVEKEKDALEGEKNIAIEFLTLENEIFRKKNHVCQYYIYELQKRIAEMETQKEKIHEDTKEINEKSNILSNEMKAKNKDVKDTEKKLNKITKFIEENKEKFTQLDLEDVQVREKLKHATSKAKKLEKQLQKDKEKVEEFKSIPAKSNNIINETTTRNNALEKEKEKEEKKLKEVMDSLKQETQGLQKEKESREKELMGFSKSVNEARSKMDVAQSELDIYLSRHNTAVSQLTKAKEALIAASETLKERKAAIRDIEGKLPQTEQELKEKEKELQKLTQEETNFKSLVHDLFQKVEEAKSSLAMNRSRGKVLDAIIQEKKSGRIPGIYGRLGDLGAIDEKYDVAISSCCHALDYIVVDSIDIAQECVNFLKRQNIGVATFIGLDKMAVWAKKMTEIQTPENTPRLFDLVKVKDEKIRQAFYFALRDTLVADNLDQATRVAYQKDRRWRVVTLQGQIIEQSGTMTGGGSKVMKGRMGSSLVIEISEEEVNKMESQLQNDSKKAMQIQEQKVQLEERVVKLRHSEREMRNTLEKFTASIQRLIEQEEYLNVQVKELEANVLATAPDKKKQKLLEENVSAFKTEYDAVAEKAGKVEAEVKRLHNTIVEINNHKLKAQQDKLDKINKQLDECASAITKAQVAIKTADRNLQKAQDSVLRTEKEIKDTEKEVDDLTAELKSLEDKAAEVVKNTNAAEESLPEIQKEHRNLLQELKVIQENEHALQKDALSIKLKLEQIDGHIAEHNSKIKYWHKEISKISLHPIEDNPIEEISVLSPEDLEAIKNPDSITNQIALLEARCHEMKPNLGAIAEYKKKEELYLQRVAELDKITYERDSFRQAYEDLRKQRLNEFMAGFYIITNKLKENYQMLTLGGDAELELVDSLDPFSEGIMFSVRPPKKSWKKIFNLSGGEKTLSSLALVFALHHYKPTPLYFMDEIDAALDFKNVSIVAFYIYEQTKNAQFIIISLRNNMFEISDRLIGIYKTYNITKSVAVNPKEIASKGLC

SEQ ID NO: 196 - DNA, 5297 bp, Homo sapiens
caacaaactaagcagttgctcaatcgttgattgatcctcaggcacgtctagattttcccacttacataggtcttgttaagaaaccagtcctgccttcttgccactcgtgtctttcgatggctcccttcccgaagtcccgctgcctctaagcggagtgttaagcggggctctcggaagccggtggaccgagatttccccgggtggggcgggcgcggtgtagcggcccgcgggctgacttgctcccggctgtcccccggccccagcgaccatgccccgtaaaggcacccagccctccactgcccggcgcagagaggaagggccgccgccgccgtcccctgacggcgccagcagcgacgcggagcctgagccgccgtccggccgcacggagagcccagccaccgccgcagagactgcaagtgaggaacttgataatagaagtttagaagagattttgaacagcattcctcctcccccgcctccagcaatgaccaatgaagctggagctcctcggcttatgataactcatattgtaaaccagaacttcaaatcctatgctggggagaaaattctgggacctttccataagcgcttttcctgtattatcgggccaaatggcagtggcaaatccaatgttattgattctatgctttttgtgtttggctatcgagcacaaaaaataagatctaaaaaactctcagtattaatacataattctgatgaacacaaggacattcagagttgtacagtagaagttcattttcaaaagataattgataaggaaggggatgattatgaagtcattcctaacagtaatttctatgtatccagaacggcctgcagagataatacttctgtctatcacataagtggaaagaaaaagacatttaaggatgttggaaatcttcttcgaagccatggaattgacttggaccataatagatttttaattttacagggtgaagttgaacaaattgctatgatgaaaccaaaaggccagactgaacacgatgagggtatgcttgaatatttagaagatataattggttgtggacggctaaatgaacctattaaagtcttgtgtcggagagttgaaatattaaatgaacacagaggagagaagttaaacagggtaaagatggtggaaaaggaaaaggatgccttagaaggagagaaaaacatagctatcgaatttcttaccttggaaaatgaaatatttagaaaaaagaatcatgtttgtcaatattatatttatgagttgcagaaacgaattgctgaaatggaaactcaaaaggaaaaaattcatgaagataccaaagaaattaatgagaagagcaatatactatcaaatgaaatgaaagctaagaataaagatgtaaaagatacagaaaagaaactgaataaaattacaaaatttattgaggagaataaagaaaaatttacacagctagatttggaagatgttcaagttagagaaaagttaaaacatgccacgagtaaagccaaaaaactggagaaacaacttcaaaaagataaagaaaaggttgaagaatttaaaagtatacctgccaagagtaacaatatcattaatgaaacaacaaccagaaacaatgccctcgagaaggaaaaagagaaagaagaaaaaaaattaaaggaagttatggatagccttaaacaggaaacacaagggcttcagaaagaaaaagaaagtcgagagaaagaacttatgggtttcagcaaatcggtaaatgaagcacgttcaaagatggatgtagcccagtcagaacttgatatctatctcagtcgtcataatactgcagtgtctcaattaactaaggctaaggaagctctaattgcagcttctgagactctcaaagaaaggaaagctgcaatcagagatatagaaggaaaactccctcaaactgaacaagaattaaaggagaaagaaaaagaacttcaaaaacttacacaagaagaaacaaactttaaaagtttggttcatgatctctttcaaaaagttgaagaagcaaagagctcattagcaatgaatcgaagtagggggaaagtccttgatgcaataattcaagaaaaaaaatctggcaggattccaggaatatatggaagattgggggacttaggagccattgatgaaaaatacgacgtggctatatcatcctgttgtcatgcactggactacattgttgttgattctattgatatagcccaagaatgtgtaaacttccttaaaagacaaaatattggagttgcaacctttataggtttagataagatggctgtatgggcgaaaaagatgaccgaaattcaaactcctgaaaatactcctcgtttatttgatttagtaaaagtaaaagatgagaaaattcgccaagctttttattttgctttacgagataccttagtagctgacaacttggatcaagccacaagagtagcatatcaaaaagatagaagatggagagtggtaactttacagggacaaatcatagaacagtcaggtacaatgactggtggtggaagcaaagtaatgaaaggaagaatgggttcctcacttgttattgaaatctctgaagaagaggtaaacaaaatggaatcacagttgcaaaacgactctaaaaaagcaatgcaaatccaagaacagaaagtacaacttgaagaaagagtagttaagttacggcatagtgaacgagaaatgaggaacacactagaaaaatttactgcaagcatccagcgtttaatagagcaagaagaatatttgaatgtccaagttaaggaacttgaagctaatgtacttgctacagcccctgacaaaaaaaagcagaaattgctagaagaaaacgttagtgctttcaaaacagaatatgatgctgtggctgagaaagctggtaaagtagaagctgaggttaaacgcttacacaataccatcgtagaaatcaataatcataaactcaaggcccaacaagacaaacttgataaaataaataagcaattagatgaatgtgcttctgctattactaaagcccaagtagcaatcaagactgctgacagaaaccttcaaaaggcacaagactctgtcttgcgtacagagaaagaaataaaagatactgagaaagaggtggatgacctaacagcagagctgaaaagtcttgaggacaaagcagcagaggtcgtaaagaatacaaatgctgcagaggaatccttaccagagatccagaaagaacatcgcaatctgcttcaagaattaaaagttattcaagaaaatgaacatgctcttcaaaaagatgcacttagtattaagttgaaacttgaacaaatagatggtcacattgctgaacataattctaaaataaaatattggcacaaagagatttcaaaaatatcactgcatcctatagaagataatcctattgaagagatttcggttctaagcccagaggatcttgaagcgatcaagaatccagattctataacaaatcaaattgcacttttggaagcccggtgtcatgaaatgaaaccaaacctcggtgccatcgcagagtataaaaagaaggaagaattgtatttgcaacgggtagcagaattggacaaaattacttatgaaagagacagttttagacaggcatatgaagatcttcggaaacaaaggcttaatgaatttatggcaggtttttatataataacaaataaattaaaggaaaattaccaaatgcttactttgggaggggacgccgaactcgagcttgtagacagcttggatcctttctctgaaggaatcatgttcagtgttcgaccacctaagaaaagttggaaaaagatcttcaacctttcgggaggagagaaaacacttagttcattggctttagtatttgctcttcaccactacaagcccactcccctttacttcatggatgagattgatgcagcccttgattttaaaaatgtgtccattgttgcattttatatatatgaacaaacaaaaaatgcacagttcataataatttctcttcgaaataatatgtttgagatttcggatagacttattggaatttacaagacatacaacataacaaaaagtgttgctgtaaatccaaaagaaattgcatctaagggactttgttgaactttatgctgaagattcttcaagttgattcagtgtattactgatttttttctatttgtaaaggattatgagttgtataaaatacatactccctaaactagatcatgaaactggtttctgttttatgcagttgtcatttgtaaagtctaataaaatattctctataattgcttctagattacaaaaatatgacaatcttgtaagtagcagactatggagaaaaatgagttacctggagggtcaggtaacttgccaaactaaaaagtatgttagttgaggcaaagtcctaagcaaggttgtgctatcaaggctcagcataccttcgtgggcctttgatttaccaacactggaaatgcctgccaactaatcttggatagattctttaaggcattccacttagcttgccagttgagacaatcaccacagttattacccaaatactatgaacatatttttgtaaaccagtcattctgaattatagtgatgagaatttaaatatatgcttttctagaatttgatgtttgaccatttatgacttaattaccagagagccagtaaattaggacagtgtttcaacaagcctaggctatctcgtaagttgaaaaatatcccactatagttgcttcatgagtatgaagtaagatggcctctgatttacactggttcaatttacaaattttcaactttatgataggtttatccgggtactaaatgcatttcaacttgatagtttcaacttatgataggtttaccaggatgtagtcccactgttgaggagcatctatttaggggttaattactttagtaataagtggaaagtaagataccttgagtaatgtttgcctataaaattgtcagcgtatttttacactattggctcaagaatgttataatgctaagggacataagttggcaaccacttggtttttggaaggactttcggtattgtattagaagtctgccctagctgttaaatttctgggtatttatcctaaggaattaattaaagagttaattgttcctttcttcagtgggccattgttttagatatttaaaaaatccaacagtttctatcataatgtaactgtaaaaatgtaaacacattattagcatggacttttaaataaagatttaaagaaagcaaaaaaaaaaaaaaaaaaaa

SEQ ID NO: 197 - protein, 1288 aa, Homo sapiens; identical to SEQ ID NO: 195

SEQ ID NO: 198 - DNA, 7907 bp, Homo sapiens
tataaaagaggcggggcgcgcgcgtcgccgccactacccgctgcggagtgaacggtgtggagcggaggccgcggaggctcctcggtccttcagcacccctcggcccgacgcacccacgcccctcaccccccgagagccgaaaatggacccaagtggggtcaaagtgctggaaacagcagaggacatccaggagaggcggcagcaggtcctagaccgataccaccgcttcaaggaactctcaacccttaggcgtcagaagctggaagattcctatcgattccagttctttcaaagagatgctgaagagctggagaaatggatacaggaaaaacttcagattgcatctgatgagaattataaagacccaaccaacttgcagggaaagcttcagaagcatcaagcatttgaagctgaagtgcaggccaactcaggagccattgttaagctggatgaaactggaaacctgatgatctcagaagggcattttgcatctgaaaccatacggacccgtttgatggagctgcaccgccagtgggaattacttttggagaagatgcgagaaaaaggaatcaaactgctgcaggcccagaagttggtgcagtacttacgagaatgtgaggacgtgatggactggatcaatgacaaggaagcaattgttacttctgaagagctgggccaggatctggagcatgtagaggttttacagaagaaatttgaagagtttcaaacagatatggctgctcatgaagaaagagttaatgaagtgaaccagtttgctgccaaactcatacaggagcagcaccctgaggaggaactgatcaagactaagcaggatgaagtcaatgcagcctggcagcggctgaagggcctggctctgcagaggcaggggaagctctttggggcagcagaagttcagcgctttaacagggatgtggatgagactatcagttggattaaggaaaaggagcagttaatggcctctgatgattttggccgagacctggcaagtgttcaggctctgcttcggaagcacgagggtctggagagagatcttgctgctctagaagacaaggtcaaagccctgtgtgctgaggctgaccgcctgcaacagtcccaccctctgagtgcaacacagattcaagtgaagcgagaggaactgattacaaactgggagcagatccgcaccttggcggcagagagacatgcacggctcaatgattcatacaggcttcaacgcttccttgctgacttccgtgacctcaccagctgggtgactgagatgaaagccctcatcaatgcagatgagcttgccagtgatgtggctggggctgaagccctgctagatagacaccaagagcacaagggtgaaattgatgcccatgaagacagcttcaaatctgcagatgaatctggacaggcactgcttgctgctggtcactatgcctcagatgaagtgagggagaagctgaccgtcctttccgaggagagagcggcgctgctggagctgtgggagctgcgcaggcagcagtacgagcagtgcatggacctgcagctcttctaccgggacactgagcaggtggacaactggatgagcaagcaggaggcgttcctgttgaatgaagacttgggagattccttggatagtgtggaagcgcttcttaagaagcacgaagactttgagaaatcccttagtgcccaggaggaaaagattacagcattagatgaatttgcaaccaagctaattcagaacaaccactatgcaatggaagatgtggccactcgccgagatgctctgttgagccgccgcaatgcccttcacgagagagccatgcgtcgccgggcccagctagccgattctttccatctgcagcagtttttccgtgattctgatgagctcaagagttgggtcaatgagaagatgaaaactgccacagatgaagcttataaagatccatccaacctacaaggaaaagtacagaagcatcaggcttttgaggctgagctctcagcaaaccagagccgaattgatgccttggagaaagctggccaaaagctgattgatgtcaaccactatgccaaggatgaagtggcagctcgtatgaatgaggtgatcagtttgtggaagaaactgctagaggccactgaactgaaaggaataaagcttcgtgaagccaaccagcaacagcaatttaatcgcaatgttgaggatattgaattgtggctatatgaagtagaaggtcacttggcttcggatgattacggcaaagatcttaccaatgtgcagaacctccagaagaaacatgccctgctagaggcagatgtggctgctcaccaggaccgaattgatggcatcaccattcaggcccgccagttccaagatgctggccattttgatgcagaaaacatcaagaagaaacaggaagccctcgtggctcgctatgaggcactcaaggagcccatggttgcccggaagcagaagctggccgattctctgcggttgcagcagctcttccgggatgttgaggatgaggagacgtggattcgagagaaagagcccattgccgcatctaccaacagaggtaaggatttaattggggtccagaatctgctaaagaaacatcaagccttacaagcagaaattgctggacatgaaccacgcatcaaagcagttacacagaaggggaatgccatggtggaggaaggccattttgctgcagaggatgtgaaggccaagcttcacgagctgaaccaaaagtgggaggcactgaaagccaaagcttcccagcgtcggcaggacctggaggactctctgcaggcccagcagtactttgctgatgctaacgaggctgaatcctggatgcgggagaaggaacccattgtgggcagcactgactatggcaaggacgaagactctgctgaggctctactgaagaaacacgaagctttgatgtcagatctcagtgcctacggcagcagcatccaggctttgcgagaacaagcacagtcctgccggcaacaagtggcccccacggatgatgagactgggaaggagctggtcttggctctctacgactatcaggagaagagtccccgagaggtcaccatgaagaagggagatatccttaccttactcaacagcaccaacaaggattggtggaaagtggaagtgaacgatcgtcagggttttgtgccggctgcgtacgtgaagaaattggaccccgcccagtcagcctcccgggagaatctcctggaggagcaaggcagcatagcactgcggcaggagcagattgacaatcagacacgcataactaaggaggccggcagtgtatctctgcgtatgaagcaggtggaagaactatatcattctctgctggaactgggtgagaagcgtaaaggcatgttggagaagagttgcaagaagtttatgttgttccgtgaagcgaatgaactacagcaatggatcaatgagaaggaagccgctctgacaagtgaggaggtcggagcagacttggagcaggttgaggtgctccagaagaagtttgatgacttccagaaggacctgaaggccaatgagtcacggttgaaggacattaacaaggtagctgaagacctggagtctgaaggtctcatggcagaggaggtgcaggctgtgcaacaacaggaagtgtatggcatgatgcccagggatgaaactgattccaagacagcctccccgtggaagtctgctcgtctgatggttcacaccgtggccacctttaattccatcaaggagctgaatgagcgctggcggtccctacagcagctggccgaggaacggagccagctcttgggcagcgcccatgaagtacagaggttccacagagatgctgatgaaaccaaagaatggattgaagagaagaatcaagctctaaacacagacaattatggacatgatctcgccagtgtccaggccctgcaacgcaagcatgagggcttcgagagggaccttgcggctctcggtgacaaggtaaactcccttggtgaaacagcagagcgcctgatccagtcccatcccgagtcagcagaagacctgcaggaaaagtgcacagagttaaaccaggcctggagcagcctggggaaacgtgcagatcagcgcaaggcaaagttgggtgactcccacgacctgcagcgcttccttagcgatttccgggacctcatgtcttggatcaatggaatacgggggttggtgtcctcagatgagctagccaaggatgtcaccggagctgaggcattgctggagcgacaccaggaacaccggacagaaatcgatgccagggctggcactttccaggcatttgagcagtttggacagcagctgttggctcacggacactatgccagccctgagatcaagcagaaacttgatattcttgaccaggagcgtgcagacctggagaaggcctgggttcagcgcaggatgatgctggatcagtgccttgaactgcagctgttccatcgggactgtgagcaagctgagaactggatggctgcccgggaggccttcttgaataccgaagacaaaggagactcactggacagcgtagaggctctgatcaaaaaacatgaagactttgacaaagcgattaacgtccaggaagagaagattgctgctctgcaggcctttgccgaccagctcatcgctgccggccattatgccaagggagacatttctagccggcgcaatgaggtcttggacaggtggcgacgtctgaaagcccagatgattgagaaaaggtcaaagctaggagaatctcaaaccctccaacagttcagccgggatgtggatgagattgaggcttggatcagtgaaaaattgcaaacagcgagtgatgagtcgtacaaggatcccaccaacatccagctttccaagctgctgagcaagcaccagaagcaccaggcttttgaagcagagctgcatgccaacgctgaccggatccgtggggttatcgacatgggcaactccctcattgaacgtggagcctgtgccggcagtgaggatgctgtcaaggcccgcctggctgccttagctgaccagtggcagttcttggtgcaaaagtcagcggaaaagagccagaaactgaaagaagccaacaagcagcagaacttcaacacagggatcaaggactttgacttctggctgtctgaggtggaggccctgctggcatccgaagattatggcaaagacctggcttctgtgaacaacctgctgaaaaagcatcaactgctggaagcagatatatctgcccatgaggatcgcctgaaggacctgaacagccaggcagacagcctgatgaccagcagtgccttcgacacctcccaagtaaaggacaagagggacaccatcaacgggcgcttccagaagatcaagagcatggcggcctcccggcgagccaagctgaatgaatcccatcgcctgcaccagttcttccgggacatggatgacgaggagtcctggatcaaggagaagaagctgctggtgggctcagaggactacggccgggacctaaccggcgtgcagaacctgaggaagaagcacaagcggctggaagcagaactggctgcgcatgagccggctattcagggtgtcctggacactggcaagaagctgtccgatgacaacaccatcgggaaagaggagatccagcagcggctggcgcagtttgtggagcactggaaagagctgaagcagctggcagctgcccggggtcagcggctggaagagtccttggaatatcagcagtttgtagccaatgtggaagaggaagaagcctggatcaatgagaaaatgaccctggtggccagcgaagattatggcgacactcttgccgccatccagggcttactgaagaaacatgaagcttttgagacagacttcaccgtccacaaggatcgcgtgaatgatgtctgcaccaatggacaagacctcattaagaagaacaatcaccatgaggagaacatctcttcaaagatgaagggcctgaacgggaaagtgtcagacctggagaaagctgcagcccagagaaaggcgaagctggatgagaactcggccttccttcagttcaactggaaggcggacgtggtggagtcctggatcggtgaaaaggagaacagcttgaagacagatgattatggccgagacctgtcttctgtgcagacgctcctcaccaaacaggaaacttttgacgctgggctgcaggccttccagcaggaaggcattgccaacatcactgccctcaaagatcagcttctcgccgccaaacacgttcagtccaaggccatcgaggcccggcacgcctccctcatgaagaggtggagccagcttctggccaactcagccgcccgcaagaagaagcttctggaggctcagagtcacttccgcaaggtggaggacctcttcctgaccttcgccaaaaaggcttctgccttcaacagctggtttgaaaatgcagaggaggacttaacagaccccgtgcgctgcaactccttggaagaaatcaaagctttgcgcgaggcccacgacgccttccgctcctccctcagctctgcccaggctgacttcaaccagctggccgagctggaccgccagatcaagagcttccgcgtagcctccaacccctacacctggtttaccatggaggccctggaggagacctggaggaacctacagaaaatcatcaaggagagggagctggagctgcagaaggaacagcggcggcaggaggagaacgacaagctgcgccaggagtttgcccagcacgccaacgccttccaccagtggatccaagagaccaggacatacctcctcgatgggtcctgtatggtggaagagtcggggaccctcgaatcccagcttgaagctaccaaacgcaagcaccaggaaatccgagccatgagaagtcagctcaaaaagatcgaggacctgggggccgccatggaggaggccctcatcctggacaacaagtacacggagcacagcaccgtgggcctcgcccagcagtgggaccagctggaccagctgggcatgcgcatgcagcacaacctggagcagcagatccaggccaggaacacaacaggtgtgactgaggaggccctcaaagaattcagcatgatgtttaaacactttgacaaggacaagtctggcaggctgaaccatcaggagttcaaatcttgcctgcgctccctgggctatgacctgcccatggtggaggaaggggaacctgaccctgagttcgaggcaatcctggacacggtggatccgaacagagatggccatgtctccttgcaagaatacatggctttcatgatcagccgcgaaactgagaacgtcaagtccagcgaggagattgagagcgccttccgggccctcagctcagagggaaagccttacgtgaccaaggaggagctctaccagaacctgacccgggaacaagccgactactgcgtctcccacatgaagccctacgtggacggcaagggccgcgagctccccaccgcgttcgactacgtggagttcacccgctcgcttttcgtgaactgagccactccctgggtcacccacccctcgctgcttgccctgcgtcgccttgctgcatgtccgctcctctgtgtgctctcactttccactgtaaccttaagcctgcttagcttggaataagacttaggagaaaatggtgcttcactaacccgcttccggtccagtcacaatcatcatgtcactgtggggacccagatctgtgtcttgaagcagctgccctcattccgacttcagaaaatcgaagcagctggctcctccccttgttctctctcccaccctcccccaaatctgttttcatgtaaaagacaaataaatgatgacttcccccaaagct

SEQ ID NO: 199 - protein, 2477 aa, Homo sapiens
MDPSGVKVLETAEDIQERRQQVLDRYHRFKELSTLRRQKLEDSYRFQFFQRDAEELEKWIQEKLQIASDENYKDPTNLQGKLQKHQAFEAEVQANSGAIVKLDETGNLMISEGHFASETIRTRLMELHRQWELLLEKMREKGIKLLQAQKLVQYLRECEDVMDWINDKEAIVTSEELGQDLEHVEVLQKKFEEFQTDMAAHEERVNEVNQFAAKLIQEQHPEEELIKTKQDEVNAAWQRLKGLALQRQGKLFGAAEVQRFNRDVDETISWIKEKEQLMASDDFGRDLASVQALLRKHEGLERDLAALEDKVKALCAEADRLQQSHPLSATQIQVKREELITNWEQIRTLAAERHARLNDSYRLQRFLADFRDLTSWVTEMKALINADELASDVAGAEALLDRHQEHKGEIDAHEDSFKSADESGQALLAAGHYASDEVREKLTVLSEERAALLELWELRRQQYEQCMDLQLFYRDTEQVDNWMSKQEAFLLNEDLGDSLDSVEALLKKHEDFEKSLSAQEEKITALDEFATKLIQNNHYAMEDVATRRDALLSRRNALHERAMRRRAQLADSFHLQQFFRDSDELKSWVNEKMKTATDEAYKDPSNLQGKVQKHQAFEAELSANQSRIDALEKAGQKLIDVNHYAKDEVAARMNEVISLWKKLLEATELKGIKLREANQQQQFNRNVEDIELWLYEVEGHLASDDYGKDLTNVQNLQKKHALLEADVAAHQDRIDGITIQARQFQDAGHFDAENIKKKQEALVARYEALKEPMVARKQKLADSLRLQQLFRDVEDEETWIREKEPIAASTNRGKDLIGVQNLLKKHQALQAEIAGHEPRIKAVTQKGNAMVEEGHFAAEDVKAKLHELNQKWEALKAKASQRRQDLEDSLQAQQYFADANEAESWMREKEPIVGSTDYGKDEDSAEALLKKHEALMSDLSAYGSSIQALREQAQSCRQQVAPTDDETGKELVLALYDYQEKSPREVTMKKGDILTLLNSTNKDWWKVEVNDRQGFVPAAYVKKLDPAQSASRENLLEEQGSIALRQEQIDNQTRITKEAGSVSLRMKQVEELYHSLLELGEKRKGMLEKSCKKFMLFREANELQQWINEKEAALTSEEVGADLEQVEVLQKKFDDFQKDLKANESRLKDINKVAEDLESEGLMAEEVQAVQQQEVYGMMPRDETDSKTASPWKSARLMVHTVATFNSIKELNERWRSLQQLAEERSQLLGSAHEVQRFHRDADETKEWIEEKNQALNTDNYGHDLASVQALQRKHEGFERDLAALGDKVNSLGETAERLIQSHPESAEDLQEKCTELNQAWSSLGKRADQRKAKLGDSHDLQRFLSDFRDLMSWINGIRGLVSSDELAKDVTGAEALLERHQEHRTEIDARAGTFQAFEQFGQQLLAHGHYASPEIKQKLDILDQERADLEKAWVQRRMMLDQCLELQLFHRDCEQAENWMAAREAFLNTEDKGDSLDSVEALIKKHEDFDKAINVQEEKIAALQAFADQLIAAGHYAKGDISSRRNEVLDRWRRLKAQMIEKRSKLGESQTLQQFSRDVDEIEAWISEKLQTASDESYKDPTNIQLSKLLSKHQKHQAFEAELHANADRIRGVIDMGNSLIERGACAGSEDAVKARLAALADQWQFLVQKSAEKSQKLKEANKQQNFNTGIKDFDFWLSEVEALLASEDYGKDLASVNNLLKKHQLLEADISAHEDRLKDLNSQADSLMTSSAFDTSQVKDKRDTINGRFQKIKSMAASRRAKLNESHRLHQFFRDMDDEESWIKEKKLLVGSEDYGRDLTGVQNLRKKHKRLEAELAAHEPAIQGVLDTGKKLSDDNTIGKEEIQQRLAQFVEHWKELKQLAAARGQRLEESLEYQQFVANVEEEEAWINEKMTLVASEDYGDTLAAIQGLLKKHEAFETDFTVHKDRVNDVCTNGQDLIKKNNHHEENISSKMKGLNGKVSDLEKAAAQRKAKLDENSAFLQFNWKADVVESWIGEKENSLKTDDYGRDLSSVQTLLTKQETFDAGLQAFQQEGIANITALKDQLLAAKHVQSKAIEARHASLMKRWSQLLANSAARKKKLLEAQSHFRKVEDLFLTFAKKASAFNSWFENAEEDLTDPVRCNSLEEIKALREAHDAFRSSLSSAQADFNQLAELDRQIKSFRVASNPYTWFTMEALEETWRNLQKIIKERELELQKEQRRQEENDKLRQEFAQHANAFHQWIQETRTYLLDGSCMVEESGTLESQLEATKRKHQEIRAMRSQLKKIEDLGAAMEEALILDNKYTEHSTVGLAQQWDQLDQLGMRMQHNLEQQIQARNTTGVTEEALKEFSMMFKHFDKDKSGRLNHQEFKSCLRSLGYDLPMVEEGEPDPEFEAILDTVDPNRDGHVSLQEYMAFMISRETENVKSSEEIESAFRALSSEGKPYVTKEELYQNLTREQADYCVSHMKPYVDGKGRELPTAFDYVEFTRSLFVN

SEQ ID NO: 200 - DNA, 7832 bp, Homo sapiens
tataaaagaggcggggcgcgcgcgtcgccgccactacccgctgcggagtgaacggtgtggagcggaggccgcggaggctcctcggtccttcagcacccctcggcccgacgcacccacgcccctcaccccccgagagccgaaaatggacccaagtggggtcaaagtgctggaaacagcagaggacatccaggagaggcggcagcaggtcctagaccgataccaccgcttcaaggaactctcaacccttaggcgtcagaagctggaagattcctatcgattccagttctttcaaagagatgctgaagagctggagaaatggatacaggaaaaacttcagattgcatctgatgagaattataaagacccaaccaacttgcagggaaagcttcagaagcatcaagcatttgaagctgaagtgcaggccaactcaggagccattgttaagctggatgaaactggaaacctgatgatctcagaagggcattttgcatctgaaaccatacggacccgtttgatggagctgcaccgccagtgggaattacttttggagaagatgcgagaaaaaggaatcaaactgctgcaggcccagaagttggtgcagtacttacgagaatgtgaggacgtgatggactggatcaatgacaaggaagcaattgttacttctgaagagctgggccaggatctggagcatgtagaggttttacagaagaaatttgaagagtttcaaacagatatggctgctcatgaagaaagagttaatgaagtgaaccagtttgctgccaaactcatacaggagcagcaccctgaggaggaactgatcaagactaagcaggatgaagtcaatgcagcctggcagcggctgaagggcctggctctgcagaggcaggggaagctctttggggcagcagaagttcagcgctttaacagggatgtggatgagactatcagttggattaaggaaaaggagcagttaatggcctctgatgattttggccgagacctggcaagtgttcaggctctgcttcggaagcacgagggtctggagagagatcttgctgctctagaagacaaggtcaaagccctgtgtgctgaggctgaccgcctgcaacagtcccaccctctgagtgcaacacagattcaagtgaagcgagaggaactgattacaaactgggagcagatccgcaccttggcggcagagagacatgcacggctcaatgattcatacaggcttcaacgcttccttgctgacttccgtgacctcaccagctgggtgactgagatgaaagccctcatcaatgcagatgagcttgccagtgatgtggctggggctgaagccctgctagatagacaccaagagcacaagggtgaaattgatgcccatgaagacagcttcaaatctgcagatgaatctggacaggcactgcttgctgctggtcactatgcctcagatgaagtgagggagaagctgaccgtcctttccgaggagagagcggcgctgctggagctgtgggagctgcgcaggcagcagtacgagcagtgcatggacctgcagctcttctaccgggacactgagcaggtggacaactggatgagcaagcaggaggcgttcctgttgaatgaagacttgggagattccttggatagtgtggaagcgcttcttaagaagcacgaagactttgagaaatcccttagtgcccaggaggaaaagattacagcattagatgaatttgcaaccaagctaattcagaacaaccactatgcaatggaagatgtggccactcgccgagatgctctgttgagccgccgcaatgcccttcacgagagagccatgcgtcgccgggcccagctagccgattctttccatctgcagcagtttttccgtgattctgatgagctcaagagttgggtcaatgagaagatgaaaactgccacagatgaagcttataaagatccatccaacctacaaggaaaagtacagaagcatcaggcttttgaggctgagctctcagcaaaccagagccgaattgatgccttggagaaagctggccaaaagctgattgatgtcaaccactatgccaaggatgaagtggcagctcgtatgaatgaggtgatcagtttgtggaagaaactgctagaggccactgaactgaaaggaataaagcttcgtgaagccaaccagcaacagcaatttaatcgcaatgttgaggatattgaattgtggctatatgaagtagaaggtcacttggcttcggatgattacggcaaagatcttaccaatgtgcagaacctccagaagaaacatgccctgctagaggcagatgtggctgctcaccaggaccgaattgatggcatcaccattcaggcccgccagttccaagatgctggccattttgatgcagaaaacatcaagaagaaacaggaagccctcgtggctcgctatgaggcactcaaggagcccatggttgcccggaagcagaagctggccgattctctgcggttgcagcagctcttccgggatgttgaggatgaggagacgtggattcgagagaaagagcccattgccgcatctaccaacagaggtaaggatttaattggggtccagaatctgctaaagaaacatcaagccttacaagcagaaattgctggacatgaaccacgcatcaaagcagttacacagaaggggaatgccatggtggaggaaggccattttgctgcagaggatgtgaaggccaagcttcacgagctgaaccaaaagtgggaggcactgaaagccaaagcttcccagcgtcggcaggacctggaggactctctgcaggcccagcagtactttgctgatgctaacgaggctgaatcctggatgcgggagaaggaacccattgtgggcagcactgactatggcaaggacgaagactctgctgaggctctactgaagaaacacgaagctttgatgtcagatctcagtgcctacggcagcagcatccaggctttgcgagaacaagcacagtcctgccggcaacaagtggcccccacggatgatgagactgggaaggagctggtcttggctctctacgactatcaggagaagagtccccgagaggtcaccatgaagaagggagatatccttaccttactcaacagcaccaacaaggattggtggaaagtggaagtgaacgatcgtcagggttttgtgccggctgcgtacgtgaagaaattggaccccgcccagtcagcctcccgggagaatctcctggaggagcaaggcagcatagcactgcggcaggagcagattgacaatcaatatcattctctgctggaactgggtgagaagcgtaaaggcatgttggagaagagttgcaagaagtttatgttgttccgtgaagcgaatgaactacagcaatggatcaatgagaaggaagccgctctgacaagtgaggaggtcggagcagacttggagcaggttgaggtgctccagaagaagtttgatgacttccagaaggacctgaaggccaatgagtcacggttgaaggacattaacaaggtagctgaagacctggagtctgaaggtctcatggcagaggaggtgcaggctgtgcaacaacaggaagtgtatggcatgatgcccagggatgaaactgattccaagacagcctccccgtggaagtctgctcgtctgatggttcacaccgtggccacctttaattccatcaaggagctgaatgagcgctggcggtccctacagcagctggccgaggaacggagccagctcttgggcagcgcccatgaagtacagaggttccacagagatgctgatgaaaccaaagaatggattgaagagaagaatcaagctctaaacacagacaattatggacatgatctcgccagtgtccaggccctgcaacgcaagcatgagggcttcgagagggaccttgcggctctcggtgacaaggtaaactcccttggtgaaacagcagagcgcctgatccagtcccatcccgagtcagcagaagacctgcaggaaaagtgcacagagttaaaccaggcctggagcagcctggggaaacgtgcagatcagcgcaaggcaaagttgggtgactcccacgacctgcagcgcttccttagcgatttccgggacctcatgtcttggatcaatggaatacgggggttggtgtcctcagatgagctagccaaggatgtcaccggagctgaggcattgctggagcgacaccaggaacaccggacagaaatcgatgccagggctggcactttccaggcatttgagcagtttggacagcagctgttggctcacggacactatgccagccctgagatcaagcagaaacttgatattcttgaccaggagcgtgcagacctggagaaggcctgggttcagcgcaggatgatgctggatcagtgccttgaactgcagctgttccatcgggactgtgagcaagctgagaactggatggctgcccgggaggccttcttgaataccgaagacaaaggagactcactggacagcgtagaggctctgatcaaaaaacatgaagactttgacaaagcgattaacgtccaggaagagaagattgctgctctgcaggcctttgccgaccagctcatcgctgccggccattatgccaagggagacatttctagccggcgcaatgaggtcttggacaggtggcgacgtctgaaagcccagatgattgagaaaaggtcaaagctaggagaatctcaaaccctccaacagttcagccgggatgtggatgagattgaggcttggatcagtgaaaaattgcaaacagcgagtgatgagtcgtacaaggatcccaccaacatccagagcaagcaccagaagcaccaggcttttgaagcagagctgcatgccaacgctgaccggatccgtggggttatcgacatgggcaactccctcattgaacgtggagcctgtgccggcagtgaggatgctgtcaaggcccgcctggctgccttagctgaccagtggcagttcttggtgcaaaagtcagcggaaaagagccagaaactgaaagaagccaacaagcagcagaacttcaacacagggatcaaggactttgacttctggctgtctgaggtggaggccctgctggcatccgaagattatggcaaagacctggcttctgtgaacaacctgctgaaaaagcatcaactgctggaagcagatatatctgcccatgaggatcgcctgaaggacctgaacagccaggcagacagcctgatgaccagcagtgccttcgacacctcccaagtaaaggacaagagggacaccatcaacgggcgcttccagaagatcaagagcatggcggcctcccggcgagccaagctgaatgaatcccatcgcctgcaccagttcttccgggacatggatgacgaggagtcctggatcaaggagaagaagctgctggtgggctcagaggactacggccgggacctaaccggcgtgcagaacctgaggaagaagcacaagcggctggaagcagaactggctgcgcatgagccggctattcagggtgtcctggacactggcaagaagctgtccgatgacaacaccatcgggaaagaggagatccagcagcggctggcgcagtttgtggagcactggaaagagctgaagcagctggcagctgcccggggtcagcggctggaagagtccttggaatatcagcagtttgtagccaatgtggaagaggaagaagcctggatcaatgagaaaatgaccctggtggccagcgaagattatggcgacactcttgccgccatccagggcttactgaagaaacatgaagcttttgagacagacttcaccgtccacaaggatcgcgtgaatgatgtctgcaccaatggacaagacctcattaagaagaacaatcaccatgaggagaacatctcttcaaagatgaagggcctgaacgggaaagtgtcagacctggagaaagctgcagcccagagaaaggcgaagctggatgagaactcggccttccttcagttcaactggaaggcggacgtggtggagtcctggatcggtgaaaaggagaacagcttgaagacagatgattatggccgagacctgtcttctgtgcagacgctcctcaccaaacaggaaacttttgacgctgggctgcaggccttccagcaggaaggcattgccaacatcactgccctcaaagatcagcttctcgccgccaaacacgttcagtccaaggccatcgaggcccggcacgcctccctcatgaagaggtggagccagcttctggccaactcagccgcccgcaagaagaagcttctggaggctcagagtcacttccgcaaggtggaggacctcttcctgaccttcgccaaaaaggcttctgccttcaacagctggtttgaaaatgcagaggaggacttaacagaccccgtgcgctgcaactccttggaagaaatcaaagctttgcgcgaggcccacgacgccttccgctcctccctcagctctgcccaggctgacttcaaccagctggccgagctggaccgccagatcaagagcttccgcgtagcctccaacccctacacctggtttaccatggaggccctggaggagacctggaggaacctacagaaaatcatcaaggagagggagctggagctgcagaaggaacagcggcggcaggaggagaacgacaagctgcgccaggagtttgcccagcacgccaacgccttccaccagtggatccaagagaccaggacatacctcctcgatgggtcctgtatggtggaagagtcggggaccctcgaatcccagcttgaagctaccaaacgcaagcaccaggaaatccgagccatgagaagtcagctcaaaaagatcgaggacctgggggccgccatggaggaggccctcatcctggacaacaagtacacggagcacagcaccgtgggcctcgcccagcagtgggaccagctggaccagctgggcatgcgcatgcagcacaacctggagcagcagatccaggccaggaacacaacaggtgtgactgaggaggccctcaaagaattcagcatgatgtttaaacactttgacaaggacaagtctggcaggctgaaccatcaggagttcaaatcttgcctgcgctccctgggctatgacctgcccatggtggaggaaggggaacctgaccctgagttcgaggcaatcctggacacggtggatccgaacagagatggccatgtctccttgcaagaatacatggctttcatgatcagccgcgaaactgagaacgtcaagtccagcgaggagattgagagcgccttccgggccctcagctcagagggaaagccttacgtgaccaaggaggagctctaccagaacctgacccgggaacaagccgactactgcgtctcccacatgaagccctacgtggacggcaagggccgcgagctccccaccgcgttcgactacgtggagttcacccgctcgcttttcgtgaactgagccactccctgggtcacccacccctcgctgcttgccctgcgtcgccttgctgcatgtccgctcctctgtgtgctctcactttccactgtaaccttaagcctgcttagcttggaataagacttaggagaaaatggtgcttcactaacccgcttccggtccagtcacaatcatcatgtcactgtggggacccagatctgtgtcttgaagcagctgccctcattccgacttcagaaaatcgaagcagctggctcctccccttgttctctctcccaccctcccccaaatctgttttcatgtaaaagacaaataaatgatgacttcccccaaagct

SEQ ID NO: 201 - protein, 2452 aa, Homo sapiens
MDPSGVKVLETAEDIQERRQQVLDRYHRFKELSTLRRQKLEDSYRFQFFQRDAEELEKWIQEKLQIASDENYKDPTNLQGKLQKHQAFEAEVQANSGAIVKLDETGNLMISEGHFASETIRTRLMELHRQWELLLEKMREKGIKLLQAQKLVQYLRECEDVMDWINDKEAIVTSEELGQDLEHVEVLQKKFEEFQTDMAAHEERVNEVNQFAAKLIQEQHPEEELIKTKQDEVNAAWQRLKGLALQRQGKLFGAAEVQRFNRDVDETISWIKEKEQLMASDDFGRDLASVQALLRKHEGLERDLAALEDKVKALCAEADRLQQSHPLSATQIQVKREELITNWEQIRTLAAERHARLNDSYRLQRFLADFRDLTSWVTEMKALINADELASDVAGAEALLDRHQEHKGEIDAHEDSFKSADESGQALLAAGHYASDEVREKLTVLSEERAALLELWELRRQQYEQCMDLQLFYRDTEQVDNWMSKQEAFLLNEDLGDSLDSVEALLKKHEDFEKSLSAQEEKITALDEFATKLIQNNHYAMEDVATRRDALLSRRNALHERAMRRRAQLADSFHLQQFFRDSDELKSWVNEKMKTATDEAYKDPSNLQGKVQKHQAFEAELSANQSRIDALEKAGQKLIDVNHYAKDEVAARMNEVISLWKKLLEATELKGIKLREANQQQQFNRNVEDIELWLYEVEGHLASDDYGKDLTNVQNLQKKHALLEADVAAHQDRIDGITIQARQFQDAGHFDAENIKKKQEALVARYEALKEPMVARKQKLADSLRLQQLFRDVEDEETWIREKEPIAASTNRGKDLIGVQNLLKKHQALQAEIAGHEPRIKAVTQKGNAMVEEGHFAAEDVKAKLHELNQKWEALKAKASQRRQDLEDSLQAQQYFADANEAESWMREKEPIVGSTDYGKDEDSAEALLKKHEALMSDLSAYGSSIQALREQAQSCRQQVAPTDDETGKELVLALYDYQEKSPREVTMKKGDILTLLNSTNKDWWKVEVNDRQGFVPAAYVKKLDPAQSASRENLLEEQGSIALRQEQIDNQYHSLLELGEKRKGMLEKSCKKFMLFREANELQQWINEKEAALTSEEVGADLEQVEVLQKKFDDFQKDLKANESRLKDINKVAEDLESEGLMAEEVQAVQQQEVYGMMPRDETDSKTASPWKSARLMVHTVATFNSIKELNERWRSLQQLAEERSQLLGSAHEVQRFHRDADETKEWIEEKNQALNTDNYGHDLASVQALQRKHEGFERDLAALGDKVNSLGETAERLIQSHPESAEDLQEKCTELNQAWSSLGKRADQRKAKLGDSHDLQRFLSDFRDLMSWINGIRGLVSSDELAKDVTGAEALLERHQEHRTEIDARAGTFQAFEQFGQQLLAHGHYASPEIKQKLDILDQERADLEKAWVQRRMMLDQCLELQLFHRDCEQAENWMAAREAFLNTEDKGDSLDSVEALIKKHEDFDKAINVQEEKIAALQAFADQLIAAGHYAKGDISSRRNEVLDRWRRLKAQMIEKRSKLGESQTLQQFSRDVDEIEAWISEKLQTASDESYKDPTNIQSKHQKHQAFEAELHANADRIRGVIDMGNSLIERGACAGSEDAVKARLAALADQWQFLVQKSAEKSQKLKEANKQQNFNTGIKDFDFWLSEVEALLASEDYGKDLASVNNLLKKHQLLEADISAHEDRLKDLNSQADSLMTSSAFDTSQVKDKRDTINGRFQKIKSMAASRRAKLNESHRLHQFFRDMDDEESWIKEKKLLVGSEDYGRDLTGVQNLRKKHKRLEAELAAHEPAIQGVLDTGKKLSDDNTIGKEEIQQRLAQFVEHWKELKQLAAARGQRLEESLEYQQFVANVEEEEAWINEKMTLVASEDYGDTLAAIQGLLKKHEAFETDFTVHKDRVNDVCTNGQDLIKKNNHHEENISSKMKGLNGKVSDLEKAAAQRKAKLDENSAFLQFNWKADVVESWIGEKENSLKTDDYGRDLSSVQTLLTKQETFDAGLQAFQQEGIANITALKDQLLAAKHVQSKAIEARHASLMKRWSQLLANSAARKKKLLEAQSHFRKVEDLFLTFAKKASAFNSWFENAEEDLTDPVRCNSLEEIKALREAHDAFRSSLSSAQADFNQLAELDRQIKSFRVASNPYTWFTMEALEETWRNLQKIIKERELELQKEQRRQEENDKLRQEFAQHANAFHQWIQETRTYLLDGSCMVEESGTLESQLEATKRKHQEIRAMRSQLKKIEDLGAAMEEALILDNKYTEHSTVGLAQQWDQLDQLGMRMQHNLEQQIQARNTTGVTEEALKEFSMMFKHFDKDKSGRLNHQEFKSCLRSLGYDLPMVEEGEPDPEFEAILDTVDPNRDGHVSLQEYMAFMISRETENVKSSEEIESAFRALSSEGKPYVTKEELYQNLTREQADYCVSHMKPYVDGKGRELPTAFDYVEFTRSLFVN

SEQ ID NO: 202 - DNA, 7892 bp, Homo sapiens
tataaaagaggcggggcgcgcgcgtcgccgccactacccgctgcggagtgaacggtgtggagcggaggccgcggaggctcctcggtccttcagcacccctcggcccgacgcacccacgcccctcaccccccgagagccgaaaatggacccaagtggggtcaaagtgctggaaacagcagaggacatccaggagaggcggcagcaggtcctagaccgataccaccgcttcaaggaactctcaacccttaggcgtcagaagctggaagattcctatcgattccagttctttcaaagagatgctgaagagctggagaaatggatacaggaaaaacttcagattgcatctgatgagaattataaagacccaaccaacttgcagggaaagcttcagaagcatcaagcatttgaagctgaagtgcaggccaactcaggagccattgttaagctggatgaaactggaaacctgatgatctcagaagggcattttgcatctgaaaccatacggacccgtttgatggagctgcaccgccagtgggaattacttttggagaagatgcgagaaaaaggaatcaaactgctgcaggcccagaagttggtgcagtacttacgagaatgtgaggacgtgatggactggatcaatgacaaggaagcaattgttacttctgaagagctgggccaggatctggagcatgtagaggttttacagaagaaatttgaagagtttcaaacagatatggctgctcatgaagaaagagttaatgaagtgaaccagtttgctgccaaactcatacaggagcagcaccctgaggaggaactgatcaagactaagcaggatgaagtcaatgcagcctggcagcggctgaagggcctggctctgcagaggcaggggaagctctttggggcagcagaagttcagcgctttaacagggatgtggatgagactatcagttggattaaggaaaaggagcagttaatggcctctgatgattttggccgagacctggcaagtgttcaggctctgcttcggaagcacgagggtctggagagagatcttgctgctctagaagacaaggtcaaagccctgtgtgctgaggctgaccgcctgcaacagtcccaccctctgagtgcaacacagattcaagtgaagcgagaggaactgattacaaactgggagcagatccgcaccttggcggcagagagacatgcacggctcaatgattcatacaggcttcaacgcttccttgctgacttccgtgacctcaccagctgggtgactgagatgaaagccctcatcaatgcagatgagcttgccagtgatgtggctggggctgaagccctgctagatagacaccaagagcacaagggtgaaattgatgcccatgaagacagcttcaaatctgcagatgaatctggacaggcactgcttgctgctggtcactatgcctcagatgaagtgagggagaagctgaccgtcctttccgaggagagagcggcgctgctggagctgtgggagctgcgcaggcagcagtacgagcagtgcatggacctgcagctcttctaccgggacactgagcaggtggacaactggatgagcaagcaggaggcgttcctgttgaatgaagacttgggagattccttggatagtgtggaagcgcttcttaagaagcacgaagactttgagaaatcccttagtgcccaggaggaaaagattacagcattagatgaatttgcaaccaagctaattcagaacaaccactatgcaatggaagatgtggccactcgccgagatgctctgttgagccgccgcaatgcccttcacgagagagccatgcgtcgccgggcccagctagccgattctttccatctgcagcagtttttccgtgattctgatgagctcaagagttgggtcaatgagaagatgaaaactgccacagatgaagcttataaagatccatccaacctacaaggaaaagtacagaagcatcaggcttttgaggctgagctctcagcaaaccagagccgaattgatgccttggagaaagctggccaaaagctgattgatgtcaaccactatgccaaggatgaagtggcagctcgtatgaatgaggtgatcagtttgtggaagaaactgctagaggccactgaactgaaaggaataaagcttcgtgaagccaaccagcaacagcaatttaatcgcaatgttgaggatattgaattgtggctatatgaagtagaaggtcacttggcttcggatgattacggcaaagatcttaccaatgtgcagaacctccagaagaaacatgccctgctagaggcagatgtggctgctcaccaggaccgaattgatggcatcaccattcaggcccgccagttccaagatgctggccattttgatgcagaaaacatcaagaagaaacaggaagccctcgtggctcgctatgaggcactcaaggagcccatggttgcccggaagcagaagctggccgattctctgcggttgcagcagctcttccgggatgttgaggatgaggagacgtggattcgagagaaagagcccattgccgcatctaccaacagaggtaaggatttaattggggtccagaatctgctaaagaaacatcaagccttacaagcagaaattgctggacatgaaccacgcatcaaagcagttacacagaaggggaatgccatggtggaggaaggccattttgctgcagaggatgtgaaggccaagcttcacgagctgaaccaaaagtgggaggcactgaaagccaaagcttcccagcgtcggcaggacctggaggactctctgcaggcccagcagtactttgctgatgctaacgaggctgaatcctggatgcgggagaaggaacccattgtgggcagcactgactatggcaaggacgaagactctgctgaggctctactgaagaaacacgaagctttgatgtcagatctcagtgcctacggcagcagcatccaggctttgcgagaacaagcacagtcctgccggcaacaagtggcccccacggatgatgagactgggaaggagctggtcttggctctctacgactatcaggagaagagtccccgagaggtcaccatgaagaagggagatatccttaccttactcaacagcaccaacaaggattggtggaaagtggaagtgaacgatcgtcagggttttgtgccggctgcgtacgtgaagaaattggaccccgcccagtcagcctcccgggagaatctcctggaggagcaaggcagcatagcactgcggcaggagcagattgacaatcagacacgcataactaaggaggccggcagtgtatctctgcgtatgaagcaggtggaagaactatatcattctctgctggaactgggtgagaagcgtaaaggcatgttggagaagagttgcaagaagtttatgttgttccgtgaagcgaatgaactacagcaatggatcaatgagaaggaagccgctctgacaagtgaggaggtcggagcagacttggagcaggttgaggtgctccagaagaagtttgatgacttccagaaggacctgaaggccaatgagtcacggttgaaggacattaacaaggtagctgaagacctggagtctgaaggtctcatggcagaggaggtgcaggctgtgcaacaacaggaagtgtatggcatgatgcccagggatgaaactgattccaagacagcctccccgtggaagtctgctcgtctgatggttcacaccgtggccacctttaattccatcaaggagctgaatgagcgctggcggtccctacagcagctggccgaggaacggagccagctcttgggcagcgcccatgaagtacagaggttccacagagatgctgatgaaaccaaagaatggattgaagagaagaatcaagctctaaacacagacaattatggacatgatctcgccagtgtccaggccctgcaacgcaagcatgagggcttcgagagggaccttgcggctctcggtgacaaggtaaactcccttggtgaaacagcagagcgcctgatccagtcccatcccgagtcagcagaagacctgcaggaaaagtgcacagagttaaaccaggcctggagcagcctggggaaacgtgcagatcagcgcaaggcaaagttgggtgactcccacgacctgcagcgcttccttagcgatttccgggacctcatgtcttggatcaatggaatacgggggttggtgtcctcagatgagctagccaaggatgtcaccggagctgaggcattgctggagcgacaccaggaacaccggacagaaatcgatgccagggctggcactttccaggcatttgagcagtttggacagcagctgttggctcacggacactatgccagccctgagatcaagcagaaacttgatattcttgaccaggagcgtgcagacctggagaaggcctgggttcagcgcaggatgatgctggatcagtgccttgaactgcagctgttccatcgggactgtgagcaagctgagaactggatggctgcccgggaggccttcttgaataccgaagacaaaggagactcactggacagcgtagaggctctgatcaaaaaacatgaagactttgacaaagcgattaacgtccaggaagagaagattgctgctctgcaggcctttgccgaccagctcatcgctgccggccattatgccaagggagacatttctagccggcgcaatgaggtcttggacaggtggcgacgtctgaaagcccagatgattgagaaaaggtcaaagctaggagaatctcaaaccctccaacagttcagccgggatgtggatgagattgaggcttggatcagtgaaaaattgcaaacagcgagtgatgagtcgtacaaggatcccaccaacatccagagcaagcaccagaagcaccaggcttttgaagcagagctgcatgccaacgctgaccggatccgtggggttatcgacatgggcaactccctcattgaacgtggagcctgtgccggcagtgaggatgctgtcaaggcccgcctggctgccttagctgaccagtggcagttcttggtgcaaaagtcagcggaaaagagccagaaactgaaagaagccaacaagcagcagaacttcaacacagggatcaaggactttgacttctggctgtctgaggtggaggccctgctggcatccgaagattatggcaaagacctggcttctgtgaacaacctgctgaaaaagcatcaactgctggaagcagatatatctgcccatgaggatcgcctgaaggacctgaacagccaggcagacagcctgatgaccagcagtgccttcgacacctcccaagtaaaggacaagagggacaccatcaacgggcgcttccagaagatcaagagcatggcggcctcccggcgagccaagctgaatgaatcccatcgcctgcaccagttcttccgggacatggatgacgaggagtcctggatcaaggagaagaagctgctggtgggctcagaggactacggccgggacctaaccggcgtgcagaacctgaggaagaagcacaagcggctggaagcagaactggctgcgcatgagccggctattcagggtgtcctggacactggcaagaagctgtccgatgacaacaccatcgggaaagaggagatccagcagcggctggcgcagtttgtggagcactggaaagagctgaagcagctggcagctgcccggggtcagcggctggaagagtccttggaatatcagcagtttgtagccaatgtggaagaggaagaagcctggatcaatgagaaaatgaccctggtggccagcgaagattatggcgacactcttgccgccatccagggcttactgaagaaacatgaagcttttgagacagacttcaccgtccacaaggatcgcgtgaatgatgtctgcaccaatggacaagacctcattaagaagaacaatcaccatgaggagaacatctcttcaaagatgaagggcctgaacgggaaagtgtcagacctggagaaagctgcagcccagagaaaggcgaagctggatgagaactcggccttccttcagttcaactggaaggcggacgtggtggagtcctggatcggtgaaaaggagaacagcttgaagacagatgattatggccgagacctgtcttctgtgcagacgctcctcaccaaacaggaaacttttgacgctgggctgcaggccttccagcaggaaggcattgccaacatcactgccctcaaagatcagcttctcgccgccaaacacgttcagtccaaggccatcgaggcccggcacgcctccctcatgaagaggtggagccagcttctggccaactcagccgcccgcaagaagaagcttctggaggctcagagtcacttccgcaaggtggaggacctcttcctgaccttcgccaaaaaggcttctgccttcaacagctggtttgaaaatgcagaggaggacttaacagaccccgtgcgctgcaactccttggaagaaatcaaagctttgcgcgaggcccacgacgccttccgctcctccctcagctctgcccaggctgacttcaaccagctggccgagctggaccgccagatcaagagcttccgcgtagcctccaacccctacacctggtttaccatggaggccctggaggagacctggaggaacctacagaaaatcatcaaggagagggagctggagctgcagaaggaacagcggcggcaggaggagaacgacaagctgcgccaggagtttgcccagcacgccaacgccttccaccagtggatccaagagaccaggacatacctcctcgatgggtcctgtatggtggaagagtcggggaccctcgaatcccagcttgaagctaccaaacgcaagcaccaggaaatccgagccatgagaagtcagctcaaaaagatcgaggacctgggggccgccatggaggaggccctcatcctggacaacaagtacacggagcacagcaccgtgggcctcgcccagcagtgggaccagctggaccagctgggcatgcgcatgcagcacaacctggagcagcagatccaggccaggaacacaacaggtgtgactgaggaggccctcaaagaattcagcatgatgtttaaacactttgacaaggacaagtctggcaggctgaaccatcaggagttcaaatcttgcctgcgctccctgggctatgacctgcccatggtggaggaaggggaacctgaccctgagttcgaggcaatcctggacacggtggatccgaacagagatggccatgtctccttgcaagaatacatggctttcatgatcagccgcgaaactgagaacgtcaagtccagcgaggagattgagagcgccttccgggccctcagctcagagggaaagccttacgtgaccaaggaggagctctaccagaacctgacccgggaacaagccgactactgcgtctcccacatgaagccctacgtggacggcaagggccgcgagctccccaccgcgttcgactacgtggagttcacccgctcgcttttcgtgaactgagccactccctgggtcacccacccctcgctgcttgccctgcgtcgccttgctgcatgtccgctcctctgtgtgctctcactttccactgtaaccttaagcctgcttagcttggaataagacttaggagaaaatggtgcttcactaacccgcttccggtccagtcacaatcatcatgtcactgtggggacccagatctgtgtcttgaagcagctgccctcattccgacttcagaaaatcgaagcagctggctcctccccttgttctctctcccaccctcccccaaatctgttttcatgtaaaagacaaataaatgatgacttcccccaaagct

SEQ ID NO: 203 - protein, 2472 aa, Homo sapiens
MDPSGVKVLETAEDIQERRQQVLDRYHRFKELSTLRRQKLEDSYRFQFFQRDAEELEKWIQEKLQIASDENYKDPTNLQGKLQKHQAFEAEVQANSGAIVKLDETGNLMISEGHFASETIRTRLMELHRQWELLLEKMREKGIKLLQAQKLVQYLRECEDVMDWINDKEAIVTSEELGQDLEHVEVLQKKFEEFQTDMAAHEERVNEVNQFAAKLIQEQHPEEELIKTKQDEVNAAWQRLKGLALQRQGKLFGAAEVQRFNRDVDETISWIKEKEQLMASDDFGRDLASVQALLRKHEGLERDLAALEDKVKALCAEADRLQQSHPLSATQIQVKREELITNWEQIRTLAAERHARLNDSYRLQRFLADFRDLTSWVTEMKALINADELASDVAGAEALLDRHQEHKGEIDAHEDSFKSADESGQALLAAGHYASDEVREKLTVLSEERAALLELWELRRQQYEQCMDLQLFYRDTEQVDNWMSKQEAFLLNEDLGDSLDSVEALLKKHEDFEKSLSAQEEKITALDEFATKLIQNNHYAMEDVATRRDALLSRRNALHERAMRRRAQLADSFHLQQFFRDSDELKSWVNEKMKTATDEAYKDPSNLQGKVQKHQAFEAELSANQSRIDALEKAGQKLIDVNHYAKDEVAARMNEVISLWKKLLEATELKGIKLREANQQQQFNRNVEDIELWLYEVEGHLASDDYGKDLTNVQNLQKKHALLEADVAAHQDRIDGITIQARQFQDAGHFDAENIKKKQEALVARYEALKEPMVARKQKLADSLRLQQLFRDVEDEETWIREKEPIAASTNRGKDLIGVQNLLKKHQALQAEIAGHEPRIKAVTQKGNAMVEEGHFAAEDVKAKLHELNQKWEALKAKASQRRQDLEDSLQAQQYFADANEAESWMREKEPIVGSTDYGKDEDSAEALLKKHEALMSDLSAYGSSIQALREQAQSCRQQVAPTDDETGKELVLALYDYQEKSPREVTMKKGDILTLLNSTNKDWWKVEVNDRQGFVPAAYVKKLDPAQSASRENLLEEQGSIALRQEQIDNQTRITKEAGSVSLRMKQVEELYHSLLELGEKRKGMLEKSCKKFMLFREANELQQWINEKEAALTSEEVGADLEQVEVLQKKFDDFQKDLKANESRLKDINKVAEDLESEGLMAEEVQAVQQQEVYGMMPRDETDSKTASPWKSARLMVHTVATFNSIKELNERWRSLQQLAEERSQLLGSAHEVQRFHRDADETKEWIEEKNQALNTDNYGHDLASVQALQRKHEGFERDLAALGDKVNSLGETAERLIQSHPESAEDLQEKCTELNQAWSSLGKRADQRKAKLGDSHDLQRFLSDFRDLMSWINGIRGLVSSDELAKDVTGAEALLERHQEHRTEIDARAGTFQAFEQFGQQLLAHGHYASPEIKQKLDILDQERADLEKAWVQRRMMLDQCLELQLFHRDCEQAENWMAAREAFLNTEDKGDSLDSVEALIKKHEDFDKAINVQEEKIAALQAFADQLIAAGHYAKGDISSRRNEVLDRWRRLKAQMIEKRSKLGESQTLQQFSRDVDEIEAWISEKLQTASDESYKDPTNIQSKHQKHQAFEAELHANADRIRGVIDMGNSLIERGACAGSEDAVKARLAALADQWQFLVQKSAEKSQKLKEANKQQNFNTGIKDFDFWLSEVEALLASEDYGKDLASVNNLLKKHQLLEADISAHEDRLKDLNSQADSLMTSSAFDTSQVKDKRDTINGRFQKIKSMAASRRAKLNESHRLHQFFRDMDDEESWIKEKKLLVGSEDYGRDLTGVQNLRKKHKRLEAELAAHEPAIQGVLDTGKKLSDDNTIGKEEIQQRLAQFVEHWKELKQLAAARGQRLEESLEYQQFVANVEEEEAWINEKMTLVASEDYGDTLAAIQGLLKKHEAFETDFTVHKDRVNDVCTNGQDLIKKNNHHEENISSKMKGLNGKVSDLEKAAAQRKAKLDENSAFLQFNWKADVVESWIGEKENSLKTDDYGRDLSSVQTLLTKQETFDAGLQAFQQEGIANITALKDQLLAAKHVQSKAIEARHASLMKRWSQLLANSAARKKKLLEAQSHFRKVEDLFLTFAKKASAFNSWFENAEEDLTDPVRCNSLEEIKALREAHDAFRSSLSSAQADFNQLAELDRQIKSFRVASNPYTWFTMEALEETWRNLQKIIKERELELQKEQRRQEENDKLRQEFAQHANAFHQWIQETRTYLLDGSCMVEESGTLESQLEATKRKHQEIRAMRSQLKKIEDLGAAMEEALILDNKYTEHSTVGLAQQWDQLDQLGMRMQHNLEQQIQARNTTGVTEEALKEFSMMFKHFDKDKSGRLNHQEFKSCLRSLGYDLPMVEEGEPDPEFEAILDTVDPNRDGHVSLQEYMAFMISRETENVKSSEEIESAFRALSSEGKPYVTKEELYQNLTREQADYCVSHMKPYVDGKGRELPTAFDYVEFTRSLFVN

SEQ ID NO: 204 - DNA, 4548 bp, Homo sapiens
gggactggaggctgccgagggggccggcgcccgagtccgggattcggccagtggtgctgagcgagtgctggaccagcggccgtcctgtgcacctggcctgtgcgcgtgcccgctgctcggcttcacccagactaaggcgcgggcagctgcgggaacaggcggggtgggcggagggagaccgggaggcacgggcgccctgtgcgcggaggaggtgaaggcggccggggccgggacgccatgtccatggaggaccccttctttgtggtgaaaggagaggtacagaaagcagtcaacactgcccagggattgtttcagagatggacagagctcctccaggacccctccacagcaacaagggaagaaatcgactggaccaccaacgagctgagaaataacctccggagcatagagtgggatctagaggaccttgatgaaaccatcagcatagttgaagcaaatcctagaaaatttaaccttgatgcaactgaattgagtataagaaaagccttcattacaagtactcggcaagttgtcagggacatgaaagatcagatgtcaacttcatctgtgcaggcattagctgaaagaaaaaatagacaggcactgctgggagacagtggcagccagaactggagcactggaacaacagataaatatgggcgtctggaccgagagctccagagagccaattctcatttcattgaggagcagcaggcacagcagcagttgatcgtggaacagcaggatgagcagttggagctggtctctggcagcatcggggtgctgaagaacatgtcccagcgcatcggaggggagctggaggaacaggcagttatgttggaagatttctctcacgaattggagagcactcagtcccggctggacaatgtgatgaagaaacttgcaaaagtatctcatatgaccagtgatcggcgccaatggtgtgccatagccatcctctttgcagtcctgttggttgtgctcatcctcttcttagtgctgtgacggcggggcctctgggtgcgagttcctcctgcatatgaaccgaggggaggaggagaagctgagcacgtgtgacattgccgtctactcacattcctatcctggaaacatactgctgcactgacttttctccgtgtgaccccacaattgacatggctcctccatcccagcgctggaagggccagtgggaagaggaaatagatgtctgcactcctggctgcagctggacaacagaagccccatgccgcctgtccagttcggaggagaactagctgctgccttgccttccgggacctcgtttgctgaggagggacttacagactccactggtgttttgctgttgctcattccatgcatctttggcagctcttttcttctgctcagacccttccccgtgctcagacagtgcaccgctgtcccatctaaagaaacctgtcaggaatacgagcttctgggtatgtttcgtttcccattgctgtagcatttcttatcccctgagagctgatgattattgaggacagaaggctcagaaacagtttgtgacagaaaatgcagtgtttcatttttcagggataaatgctaagataaaattgcttttccaggtcatttttttttgtggtaagaataactaatggaaaataatgaaacaccctggggtttgggggtgctaacaacttgtggctttaactgacaggagcaattaaaaagagcaagagggttctgcattggcatagcttagggaagggttaatgatgtcgccacaggtcagctcctgatccttgccgacttgatgttgctgtaccagggcttcctccccagaggtgcagcttgcgttttgagggtgattgctacatatgttgttgctaaacagctcagtaacacacttgaatgaatttggataccagattgtcctcattacagttcttttactcttagggcactctacactgggggttggggttgggagtggttagtacatttattacatttattaagaaacgtaatgacataaaaggttagctctgggccagacttctcttactctgtgggtaatggcaaggatgtgtaggtaaacttggttcttttttttccctaagatgacagcttgattttatcatctgcagtcaaataactgagccaatccaaatttaaatgatagatgctttaattgagtttaagtagctgaaactgctgagacactaaactttaaccttctgatgactttttaaaatgcctcaaatgtgcacatgtatataggatatttttataacttccctgatgaataatctgatattaaagtagtatttggacccagagccagaactcggtggtggaggctgctggtctctcctcaccaccttcttttgcacttggaaagaacagcaacatctggatagagttctggctttgacttctcatttccttgtctttttgggtgcattcctcagcacactttttttttaaacctttttgttttgttttgtttgtatttcatgtggttttatttgggggttttggttttttcacccttttttgtgatttgcaatgatgtgcttgcccagctaacttttgaattgcactttttaataaatattcttaacaatttttgaagaaggatattttatctcatttgagatcatggtaggttaagaaaatatgcctgttgatgaaagctaaaagcaaatttatgaaactaaaagggtgattgacatccatgtttacactccgctctaatgtttgatatataaataagttattttcaaattaggaaaaaacagtgagtattacaaagggcttcagatgtttagagtactaggttatttatgttttacaaagtttgaatcttctataaactaagaaaggggatgatccttagatttgcattaaaatatagaagtcttttaaagtaaatgtgaaccttgtctaagtactgtaatccacacaacacattataagaagcaaaccagcatcttaaggaattataaaattaccctatttaaaagccatgctattgttctgctattaccagatttattgtgccacacaaaaggatcatgtgtgtcagcaggggccgtttggaacaaacctagtcattaatgagtaagatactcctgttagttcagggaccaagttttatgacccagaggcttaatgatgtttggatatatttcaaatcggcgtgcttacctcactgatttaaattattttctaaatagtggccattgtagacctgactcaggctgaagctaaatagagaacaatttagaaagttaactaacaatacagtgcattctacccgtagggccaccatgcccttctgcccctggctgatttgatcctgtgtctgatcccattgcaccctgactgggcagtccctacagaaccagtgttaatttgaagggcctccactcaggctccaaatgtggcagccaaagagaacaatccagggaacctacatttatttttaaggacaaatatttcctcctcagtggtcctaatgttcagggctttagagggaacccaggtggtctcttcaccctgtgtcctagaatgggagagtaagtagacagtggtgataaccccacactgcttataagtgcatctttatagtatttggggctttcctacccctttagccttctgtacctagtaccatattccagttttaaagaactggcagaatgtgatggataacagaggaagagctcaatttatgtttattggaagaacattttacttaaatgatttgaggggtgggagggagtgaactactgagtttgccagagtgaaaatccatctgaaaaactcagctacctttagtttttagtcctcatttttggtcttgtctctgcggactgtgaagaatcacaatgctctatatgccctggactgtgtggcaaatgcaggttgcagcgtgtgtgttacatgaggatcttccacaatttcagaatgcacgccagagctgaagggggaaacttggtaacttgcccattattctctgcttttagccagagttaaacagactgatgggtctggtagccaacaacttggcaacttccactccttctcacctcgtgagattaagggctgtgaaaagaaatctagtctaactccaacagaaatctgtctctgttaagtgttttaccttctgtaagtagagatggtagagccaagatttttcttttggtaatttccctgtctataaagtgagaccaaagggatatctgttccctgttacctttttggagaattcataacatttgaagatcaaaaaattgaatgataaatatgaatggcttttcaattctgtggactttgtaccatttggcttcaccttgtactgcaagatgaatttgtaaacaaaacaaaattggactgtctggaaagctaaagttctgaaatatggaatgtactgcctctaatttttctttgtcttcctctcactggcatttttttctctcccaggtttcttaagaataatgttttttaaaggaggctttttgcccatcaagaataaaaagaaataaaaccaaaaaaaaaaaaaaa

SEQ ID NO: 205 - protein, 255 aa, Homo sapiens
MSMEDPFFVVKGEVQKAVNTAQGLFQRWTELLQDPSTATREEIDWTTNELRNNLRSIEWDLEDLDETISIVEANPRKFNLDATELSIRKAFITSTRQVVRDMKDQMSTSSVQALAERKNRQALLGDSGSQNWSTGTTDKYGRLDRELQRANSHFIEEQQAQQQLIVEQQDEQLELVSGSIGVLKNMSQRIGGELEEQAVMLEDFSHELESTQSRLDNVMKKLAKVSHMTSDRRQWCAIAILFAVLLVVLILFLVL

SEQ ID NO: 206 - DNA, 4129 bp, Homo sapiens
caccctctccgcctttcccgacaccccaaagtagcgctgcgagcagctgcgtctccctcccggggctcgcgcgcccagaaccctccggtctcaaggaagcagggtgcgaagtaccacattactgtcatctccctgtgagtgggattggcaccccggctgcagctccaggagcaagtactccaggaagcacagagctgtaccagtacacggcccacgttgccaggccccaggcatggaagagctgatatgggaacagtacactgtgaccctacaaaaggattccaaaagaggatttggaattgcagtgtccggaggcagagacaacccccactttgaaaatggagaaacgtcaattgtcatttctgatgtgctcccgggtgggcctgctgatgggctgctccaagaaaatgacagagtggtcatggtcaatggcacccccatggaggatgtgcttcattcgtttgcagttcagcagctcagaaaaagtgggaaggtcgctgctattgtggtcaagaggccccggaaggtccaggtggccgcacttcaggccagccctcccctggatcaggatgaccgggcttttgaggtgatggacgagtttgatggcagaagtttccggagtggctacagcgagaggagccggctgaacagccatggggggcgcagccgcagctgggaggacagcccggaaagggggcgtccccatgagcgggcccggagccgggagcgggacctcagccgggaccggagccgtggccggagcctggagcggggcctggaccaagaccatgcgcgcacccgagaccgcagccgtggccggagcctggagcggggcctggaccacgactttgggccatcccgggaccgggaccgtgaccgcagccgcggccggagcattgaccaggactacgagcgagcctatcaccgggcctacgacccagactacgagcgggcctacagcccggagtacaggcgcggggcccgccacgatgcccgctctcggggaccccgaagccgcagccgcgagcacccgcactcacggagccccagccccgagcctagggggcggccggggcccatcggggtcctcctgatgaaaagcagagcgaacgaagagtatggtctccggcttgggagtcagatcttcgtaaaggaaatgacccgaacgggtctggcaactaaagatggcaaccttcacgaaggagacataattctcaagatcaatgggactgtaactgagaacatgtctttaacggatgctcgaaaattgatagaaaagtcaagaggaaaactacagctagtggtgttgagagacagccagcagaccctcatcaacatcccgtcattaaatgacagtgactcagaaatagaagatatttcagaaatagagtcaaaccgatcattttctccagaggagagacgtcatcagtattctgattatgattatcattcctcaagtgagaagctgaaggaaaggccaagttccagagaggacacgccgagcagattgtccaggatgggtgcgacacccactccctttaagtccacaggggatattgcaggcacagttgtcccagagaccaacaaggaacccagataccaagaggaccccccagctcctcaaccaaaagcagccccgagaacttttcttcgtcctagtcctgaagatgaagcaatatatggccctaataccaaaatggtaaggttcaagaagggagacagcgtgggcctccggttggctggtggcaatgatgtcgggatatttgttgctggcattcaagaagggacctcggcggagcaggagggccttcaagaaggagaccagattctgaaggtgaacacacaggatttcagaggattagtgcgggaggatgccgttctctacctgttagaaatccctaaaggtgaaatggtgaccattttagctcagagccgagccgatgtgtatagagacatcctggcttgtggcagaggggattcgttttttataagaagccactttgaatgtgagaaggaaactccacagagcctggccttcaccagaggggaggtcttccgagtggtagacacactgtatgacggcaagctgggcaactggctggctgtgaggattgggaacgagttggagaaaggcttaatccccaacaagagcagagctgaacaaatggccagtgttcaaaatgcccagagagacaacgctggggaccgggcagatttctggagaatgcgtggccagaggtctggggtgaagaagaacctgaggaaaagtcgggaagacctcacagctgttgtgtctgtcagcaccaagttcccagcttatgagagggttttgctgcgagaagctggtttcaagagacctgtggtcttattcggccccatagctgatatagcaatggaaaaattggctaatgagttacctgactggtttcaaactgctaaaacggaaccaaaagatgcaggatctgagaaatccactggagtggtccggttaaataccgtgaggcaaattattgaacaggataagcatgcactactggatgtgactccgaaagctgtggacctgttgaattacacccagtggttcccaattgtgatttttttcaacccagactccagacaaggtgtcaaaaccatgagacaaaggttaaatccaacgtccaacaaaagttctcgaaagttatttgatcaagccaacaagcttaaaaaaacgtgtgcacacctttttacagctacaatcaacctaaattcagccaatgatagctggtttggcagcttaaaggacactattcagcatcagcaaggagaagcggtttgggtctctgaaggaaagatggaagggatggatgatgaccccgaagaccgcatgtcctacttaaccgccatgggcgcggactatctgagttgcgacagccgcctcatcagtgactttgaagacacggacggtgaaggaggcgcctacactgacaatgagctggatgagccagccgaggagccgctggtgtcgtccatcacccgctcctcggagccggtgcagcacgaggagatcgaaattgcccagaagcatcctgatatctatgcagttccaatcaaaacgcacaagccagaccctggcacgccccagcacacgagttccagaccccctgagccacagaaagctccttccagaccttatcaggataccagaggaagttatggcagtgatgccgaggaggaggagtaccgccagcagctgtcagaacactccaagcgcggttactatggccagtctgcccgataccgggacacagaattatagatgtctgagcacggactctcccaggcctgcctgcatggcatcagactagccactcctgccaggccgccgggatggttcttctccagttagaatgcaccatggagacgtggtgggactccagctcgtgtgtcctcatggagaacccaggggacagctggtgcaaattcagaactgagggctctgtttgtgggactgggttagaggagtctgtggctttttgttcagaattaagcagaacactgcagtcagatcctgttacttgcttcagtggaccgaaatctgtattctgtttgcgtacttgtaatatgtatattaagaagcaataactatttttcctcattaatagctgccttcaaggactgtttcagtgtgagtcagaatgtgaaaaaggaataaaaaatactgttgggctcaaactaaattcaaagaagtactttattgcaactcttttaagtgccttggatgagaagtgtcttaaattttcttcctttgaagctttaggcagagccataatggactaaaacattttgactaagtttttataccagcttaatagctgtagttttccctgcactgtgtcatcttttcaaggcatttgtctttgtaatattttccataaatttggactgtctatatcataactatacttgatagtttggctataagtgctcaatagcttgaagcccaagaagttggtatcgaaatttgttgtttgtttaaacccaagtgctgcacaaaagcagatacttgaggaaaacactatttccaaaagcacatgtattgacaacagttttataatttaataaaaaggaatacattgcaatccgtaatttt

SEQ ID NO: 207 - protein, 1020 aa, Homo sapiens
MEELIWEQYTVTLQKDSKRGFGIAVSGGRDNPHFENGETSIVISDVLPGGPADGLLQENDRVVMVNGTPMEDVLHSFAVQQLRKSGKVAAIVVKRPRKVQVAALQASPPLDQDDRAFEVMDEFDGRSFRSGYSERSRLNSHGGRSRSWEDSPERGRPHERARSRERDLSRDRSRGRSLERGLDQDHARTRDRSRGRSLERGLDHDFGPSRDRDRDRSRGRSIDQDYERAYHRAYDPDYERAYSPEYRRGARHDARSRGPRSRSREHPHSRSPSPEPRGRPGPIGVLLMKSRANEEYGLRLGSQIFVKEMTRTGLATKDGNLHEGDIILKINGTVTENMSLTDARKLIEKSRGKLQLVVLRDSQQTLINIPSLNDSDSEIEDISEIESNRSFSPEERRHQYSDYDYHSSSEKLKERPSSREDTPSRLSRMGATPTPFKSTGDIAGTVVPETNKEPRYQEDPPAPQPKAAPRTFLRPSPEDEAIYGPNTKMVRFKKGDSVGLRLAGGNDVGIFVAGIQEGTSAEQEGLQEGDQILKVNTQDFRGLVREDAVLYLLEIPKGEMVTILAQSRADVYRDILACGRGDSFFIRSHFECEKETPQSLAFTRGEVFRVVDTLYDGKLGNWLAVRIGNELEKGLIPNKSRAEQMASVQNAQRDNAGDRADFWRMRGQRSGVKKNLRKSREDLTAVVSVSTKFPAYERVLLREAGFKRPVVLFGPIADIAMEKLANELPDWFQTAKTEPKDAGSEKSTGVVRLNTVRQIIEQDKHALLDVTPKAVDLLNYTQWFPIVIFFNPDSRQGVKTMRQRLNPTSNKSSRKLFDQANKLKKTCAHLFTATINLNSANDSWFGSLKDTIQHQQGEAVWVSEGKMEGMDDDPEDRMSYLTAMGADYLSCDSRLISDFEDTDGEGGAYTDNELDEPAEEPLVSSITRSSEPVQHEEIEIAQKHPDIYAVPIKTHKPDPGTPQHTSSRPPEPQKAPSRPYQDTRGSYGSDAEEEEYRQQLSEHSKRGYYGQSARYRDTEL

SEQ ID NO: 208 - DNA, 4459 bp, Homo sapiens
atatggatgtgtcactgtgtgagatgacaacaggatttgctggaaatgtgggccactattgtatccgccttacgtaaccacatggagtgatggaaatgggtgagcagcccggaatgtaggcggtggcctggcccatgcatctccagagaccatgaagactgctcaagccctacataggatgtggatccaggctgttaaaaagttgaggagatggaaaggccgtgccccaggcatggaagagctgatatgggaacagtacactgtgaccctacaaaaggattccaaaagaggatttggaattgcagtgtccggaggcagagacaacccccactttgaaaatggagaaacgtcaattgtcatttctgatgtgctcccgggtgggcctgctgatgggctgctccaagaaaatgacagagtggtcatggtcaatggcacccccatggaggatgtgcttcattcgtttgcagttcagcagctcagaaaaagtgggaaggtcgctgctattgtggtcaagaggccccggaaggtccaggtggccgcacttcaggccagccctcccctggatcaggatgaccgggcttttgaggtgatggacgagtttgatggcagaagtttccggagtggctacagcgagaggagccggctgaacagccatggggggcgcagccgcagctgggaggacagcccggaaagggggcgtccccatgagcgggcccggagccgggagcgggacctcagccgggaccggagccgtggccggagcctggagcggggcctggaccaagaccatgcgcgcacccgagaccgcagccgtggccggagcctggagcggggcctggaccacgactttgggccatcccgggaccgggaccgtgaccgcagccgcggccggagcattgaccaggactacgagcgagcctatcaccgggcctacgacccagactacgagcgggcctacagcccggagtacaggcgcggggcccgccacgatgcccgctctcggggaccccgaagccgcagccgcgagcacccgcactcacggagccccagccccgagcctagggggcggccggggcccatcggggtcctcctgatgaaaagcagagcgaacgaagagtatggtctccggcttgggagtcagatcttcgtaaaggaaatgacccgaacgggtctggcaactaaagatggcaaccttcacgaaggagacataattctcaagatcaatgggactgtaactgagaacatgtctttaacggatgctcgaaaattgatagaaaagtcaagaggaaaactacagctagtggtgttgagagacagccagcagaccctcatcaacatcccgtcattaaatgacagtgactcagaaatagaagatatttcagaaatagagtcaaaccgatcattttctccagaggagagacgtcatcagtattctgattatgattatcattcctcaagtgagaagctgaaggaaaggccaagttccagagaggacacgccgagcagattgtccaggatgggtgcgacacccactccctttaagtccacaggggatattgcaggcacagttgtcccagagaccaacaaggaacccagataccaagaggaccccccagctcctcaaccaaaagcagccccgagaacttttcttcgtcctagtcctgaagatgaagcaatatatggccctaataccaaaatggtaaggttcaagaagggagacagcgtgggcctccggttggctggtggcaatgatgtcgggatatttgttgctggcattcaagaagggacctcggcggagcaggagggccttcaagaaggagaccagattctgaaggtgaacacacaggatttcagaggattagtgcgggaggatgccgttctctacctgttagaaatccctaaaggtgaaatggtgaccattttagctcagagccgagccgatgtgtatagagacatcctggcttgtggcagaggggattcgttttttataagaagccactttgaatgtgagaaggaaactccacagagcctggccttcaccagaggggaggtcttccgagtggtagacacactgtatgacggcaagctgggcaactggctggctgtgaggattgggaacgagttggagaaaggcttaatccccaacaagagcagagctgaacaaatggccagtgttcaaaatgcccagagagacaacgctggggaccgggcagatttctggagaatgcgtggccagaggtctggggtgaagaagaacctgaggaaaagtcgggaagacctcacagctgttgtgtctgtcagcaccaagttcccagcttatgagagggttttgctgcgagaagctggtttcaagagacctgtggtcttattcggccccatagctgatatagcaatggaaaaattggctaatgagttacctgactggtttcaaactgctaaaacggaaccaaaagatgcaggatctgagaaatccactggagtggtccggttaaataccgtgaggcaaattattgaacaggataagcatgcactactggatgtgactccgaaagctgtggacctgttgaattacacccagtggttcccaattgtgatttttttcaacccagactccagacaaggtgtcaaaaccatgagacaaaggttaaatccaacgtccaacaaaagttctcgaaagttatttgatcaagccaacaagcttaaaaaaacgtgtgcacacctttttacagctacaatcaacctaaattcagccaatgatagctggtttggcagcttaaaggacactattcagcatcagcaaggagaagcggtttgggtctctgaaggaaagatggaagggatggatgatgaccccgaagaccgcatgtcctacttaaccgccatgggcgcggactatctgagttgcgacagccgcctcatcagtgactttgaagacacggacggtgaaggaggcgcctacactgacaatgagctggatgagccagccgaggagccgctggtgtcgtccatcacccgctcctcggagccggtgcagcacgaggaggccaaaacccagaacaaagaagaatcctatgacttctccaaatcctatgaatataagtcaaacccctctgccgttgctggtaatgaaactcctggggcatctaccaaaggttatcctcctcctgttgcagcaaaacctacctttgggcggtctatactgaagccctccactcccatccctcctcaagagggtgaggaggtgggagagagcagtgaggagcaagataatgctcccaaatcagtcctgggcaaagtcaaaatatttgagaagatggatcacaaggccaggttacagagaatgcaggagctccaggaagcacagaatgcaaggatcgaaattgcccagaagcatcctgatatctatgcagttccaatcaaaacgcacaagccagaccctggcacgccccagcacacgagttccagaccccctgagccacagaaagctccttccagaccttatcaggataccagaggaagttatggcagtgatgccgaggaggaggagtaccgccagcagctgtcagaacactccaagcgcggttactatggccagtctgcccgataccgggacacagaattatagatgtctgagcacggactctcccaggcctgcctgcatggcatcagactagccactcctgccaggccgccgggatggttcttctccagttagaatgcaccatggagacgtggtgggactccagctcgtgtgtcctcatggagaacccaggggacagctggtgcaaattcagaactgagggctctgtttgtgggactgggttagaggagtctgtggctttttgttcagaattaagcagaacactgcagtcagatcctgttacttgcttcagtggaccgaaatctgtattctgtttgcgtacttgtaatatgtatattaagaagcaataactatttttcctcattaatagctgccttcaaggactgtttcagtgtgagtcagaatgtgaaaaaggaataaaaaatactgttgggctcaaactaaattcaaagaagtactttattgcaactcttttaagtgccttggatgagaagtgtcttaaattttcttcctttgaagctttaggcagagccataatggactaaaacattttgactaagtttttataccagcttaatagctgtagttttccctgcactgtgtcatcttttcaaggcatttgtctttgtaatattttccataaatttggactgtctatatcataactatacttgatagtttggctataagtgctcaatagcttgaagcccaagaagttggtatcgaaatttgttgtttgtttaaacccaagtgctgcacaaaagcagatacttgaggaaaacactatttccaaaagcacatgtattgacaacagttttataatttaataaaaaggaatacattgcaatccgtaatttt

SEQ ID NO: 209 - protein, 1157 aa, Homo sapiens
MKTAQALHRMWIQAVKKLRRWKGRAPGMEELIWEQYTVTLQKDSKRGFGIAVSGGRDNPHFENGETSIVISDVLPGGPADGLLQENDRVVMVNGTPMEDVLHSFAVQQLRKSGKVAAIVVKRPRKVQVAALQASPPLDQDDRAFEVMDEFDGRSFRSGYSERSRLNSHGGRSRSWEDSPERGRPHERARSRERDLSRDRSRGRSLERGLDQDHARTRDRSRGRSLERGLDHDFGPSRDRDRDRSRGRSIDQDYERAYHRAYDPDYERAYSPEYRRGARHDARSRGPRSRSREHPHSRSPSPEPRGRPGPIGVLLMKSRANEEYGLRLGSQIFVKEMTRTGLATKDGNLHEGDIILKINGTVTENMSLTDARKLIEKSRGKLQLVVLRDSQQTLINIPSLNDSDSEIEDISEIESNRSFSPEERRHQYSDYDYHSSSEKLKERPSSREDTPSRLSRMGATPTPFKSTGDIAGTVVPETNKEPRYQEDPPAPQPKAAPRTFLRPSPEDEAIYGPNTKMVRFKKGDSVGLRLAGGNDVGIFVAGIQEGTSAEQEGLQEGDQILKVNTQDFRGLVREDAVLYLLEIPKGEMVTILAQSRADVYRDILACGRGDSFFIRSHFECEKETPQSLAFTRGEVFRVVDTLYDGKLGNWLAVRIGNELEKGLIPNKSRAEQMASVQNAQRDNAGDRADFWRMRGQRSGVKKNLRKSREDLTAVVSVSTKFPAYERVLLREAGFKRPVVLFGPIADIAMEKLANELPDWFQTAKTEPKDAGSEKSTGVVRLNTVRQIIEQDKHALLDVTPKAVDLLNYTQWFPIVIFFNPDSRQGVKTMRQRLNPTSNKSSRKLFDQANKLKKTCAHLFTATINLNSANDSWFGSLKDTIQHQQGEAVWVSEGKMEGMDDDPEDRMSYLTAMGADYLSCDSRLISDFEDTDGEGGAYTDNELDEPAEEPLVSSITRSSEPVQHEEAKTQNKEESYDFSKSYEYKSNPSAVAGNETPGASTKGYPPPVAAKPTFGRSILKPSTPIPPQEGEEVGESSEEQDNAPKSVLGKVKIFEKMDHKARLQRMQELQEAQNARIEIAQKHPDIYAVPIKTHKPDPGTPQHTSSRPPEPQKAPSRPYQDTRGSYGSDAEEEEYRQQLSEHSKRGYYGQSARYRDTEL

SEQ ID NO: 210 - DNA, 4500 bp, Homo sapiens
atgaagactgctcaagccctacataggatgtggatccaggctgttaaaaagttgaggagatggaaaggccgtgtgagtccctctgcaagctctccccttgttttccccaacctttcttcatgggaaggggagggaagcaaaaccattctcacagccccaggcatggaagagctgatatgggaacagtacactgtgaccctacaaaaggattccaaaagaggatttggaattgcagtgtccggaggcagagacaacccccactttgaaaatggagaaacgtcaattgtcatttctgatgtgctcccgggtgggcctgctgatgggctgctccaagaaaatgacagagtggtcatggtcaatggcacccccatggaggatgtgcttcattcgtttgcagttcagcagctcagaaaaagtgggaaggtcgctgctattgtggtcaagaggccccggaaggtccaggtggccgcacttcaggccagccctcccctggatcaggatgaccgggcttttgaggtgatggacgagtttgatggcagaagtttccggagtggctacagcgagaggagccggctgaacagccatggggggcgcagccgcagctgggaggacagcccggaaagggggcgtccccatgagcgggcccggagccgggagcgggacctcagccgggaccggagccgtggccggagcctggagcggggcctggaccaagaccatgcgcgcacccgagaccgcagccgtggccggagcctggagcggggcctggaccacgactttgggccatcccgggaccgggaccgtgaccgcagccgcggccggagcattgaccaggactacgagcgagcctatcaccgggcctacgacccagactacgagcgggcctacagcccggagtacaggcgcggggcccgccacgatgcccgctctcggggaccccgaagccgcagccgcgagcacccgcactcacggagccccagccccgagcctagggggcggccggggcccatcggggtcctcctgatgaaaagcagagcgaacgaagagtatggtctccggcttgggagtcagatcttcgtaaaggaaatgacccgaacgggtctggcaactaaagatggcaaccttcacgaaggagacataattctcaagatcaatgggactgtaactgagaacatgtctttaacggatgctcgaaaattgatagaaaagtcaagaggaaaactacagctagtggtgttgagagacagccagcagaccctcatcaacatcccgtcattaaatgacagtgactcagaaatagaagatatttcagaaatagagtcaaaccgatcattttctccagaggagagacgtcatcagtattctgattatgattatcattcctcaagtgagaagctgaaggaaaggccaagttccagagaggacacgccgagcagattgtccaggatgggtgcgacacccactccctttaagtccacaggggatattgcaggcacagttgtcccagagaccaacaaggaacccagataccaagaggaccccccagctcctcaaccaaaagcagccccgagaacttttcttcgtcctagtcctgaagatgaagcaatatatggccctaataccaaaatggtaaggttcaagaagggagacagcgtgggcctccggttggctggtggcaatgatgtcgggatatttgttgctggcattcaagaagggacctcggcggagcaggagggccttcaagaaggagaccagattctgaaggtgaacacacaggatttcagaggattagtgcgggaggatgccgttctctacctgttagaaatccctaaaggtgaaatggtgaccattttagctcagagccgagccgatgtgtatagagacatcctggcttgtggcagaggggattcgttttttataagaagccactttgaatgtgagaaggaaactccacagagcctggccttcaccagaggggaggtcttccgagtggtagacacactgtatgacggcaagctgggcaactggctggctgtgaggattgggaacgagttggagaaaggcttaatccccaacaagagcagagctgaacaaatggccagtgttcaaaatgcccagagagacaacgctggggaccgggcagatttctggagaatgcgtggccagaggtctggggtgaagaagaacctgaggaaaagtcgggaagacctcacagctgttgtgtctgtcagcaccaagttcccagcttatgagagggttttgctgcgagaagctggtttcaagagacctgtggtcttattcggccccatagctgatatagcaatggaaaaattggctaatgagttacctgactggtttcaaactgctaaaacggaaccaaaagatgcaggatctgagaaatccactggagtggtccggttaaataccgtgaggcaaattattgaacaggataagcatgcactactggatgtgactccgaaagctgtggacctgttgaattacacccagtggttcccaattgtgatttttttcaacccagactccagacaaggtgtcaaaaccatgagacaaaggttaaatccaacgtccaacaaaagttctcgaaagttatttgatcaagccaacaagcttaaaaaaacgtgtgcacacctttttacagctacaatcaacctaaattcagccaatgatagctggtttggcagcttaaaggacactattcagcatcagcaaggagaagcggtttgggtctctgaaggaaagatggaagggatggatgatgaccccgaagaccgcatgtcctacttaaccgccatgggcgcggactatctgagttgcgacagccgcctcatcagtgactttgaagacacggacggtgaaggaggcgcctacactgacaatgagctggatgagccagccgaggagccgctggtgtcgtccatcacccgctcctcggagccggtgcagcacgaggagagcataaggaaacccagcccagagccacgagctcagatgaggagggctgctagcagcgatcaacttagggacaatagcccgcccccagcattcaagccagagccgcccaaggccaaaacccagaacaaagaagaatcctatgacttctccaaatcctatgaatataagtcaaacccctctgccgttgctggtaatgaaactcctggggcatctaccaaaggttatcctcctcctgttgcagcaaaacctacctttgggcggtctatactgaagccctccactcccatccctcctcaagagggtgaggaggtgggagagagcagtgaggagcaagataatgctcccaaatcagtcctgggcaaagtcaaaatatttgagaagatggatcacaaggccaggttacagagaatgcaggagctccaggaagcacagaatgcaaggatcgaaattgcccagaagcatcctgatatctatgcagttccaatcaaaacgcacaagccagaccctggcacgccccagcacacgagttccagaccccctgagccacagaaagctccttccagaccttatcaggataccagaggaagttatggcagtgatgccgaggaggaggagtaccgccagcagctgtcagaacactccaagcgcggttactatggccagtctgcccgataccgggacacagaattatagatgtctgagcacggactctcccaggcctgcctgcatggcatcagactagccactcctgccaggccgccgggatggttcttctccagttagaatgcaccatggagacgtggtgggactccagctcgtgtgtcctcatggagaacccaggggacagctggtgcaaattcagaactgagggctctgtttgtgggactgggttagaggagtctgtggctttttgttcagaattaagcagaacactgcagtcagatcctgttacttgcttcagtggaccgaaatctgtattctgtttgcgtacttgtaatatgtatattaagaagcaataactatttttcctcattaatagctgccttcaaggactgtttcagtgtgagtcagaatgtgaaaaaggaataaaaaatactgttgggctcaaactaaattcaaagaagtactttattgcaactcttttaagtgccttggatgagaagtgtcttaaattttcttcctttgaagctttaggcagagccataatggactaaaacattttgactaagtttttataccagcttaatagctgtagttttccctgcactgtgtcatcttttcaaggcatttgtctttgtaatattttccataaatttggactgtctatatcataactatacttgatagtttggctataagtgctcaatagcttgaagcccaagaagttggtatcgaaatttgttgtttgtttaaacccaagtgctgcacaaaagcagatacttgaggaaaacactatttccaaaagcacatgtattgacaacagttttataatttaataaaaaggaatacattgcaatccgtaatttt

SEQ ID NO: 211 - protein, 1221 aa, Homo sapiens
MKTAQALHRMWIQAVKKLRRWKGRVSPSASSPLVFPNLSSWEGEGSKTILTAPGMEELIWEQYTVTLQKDSKRGFGIAVSGGRDNPHFENGETSIVISDVLPGGPADGLLQENDRVVMVNGTPMEDVLHSFAVQQLRKSGKVAAIVVKRPRKVQVAALQASPPLDQDDRAFEVMDEFDGRSFRSGYSERSRLNSHGGRSRSWEDSPERGRPHERARSRERDLSRDRSRGRSLERGLDQDHARTRDRSRGRSLERGLDHDFGPSRDRDRDRSRGRSIDQDYERAYHRAYDPDYERAYSPEYRRGARHDARSRGPRSRSREHPHSRSPSPEPRGRPGPIGVLLMKSRANEEYGLRLGSQIFVKEMTRTGLATKDGNLHEGDIILKINGTVTENMSLTDARKLIEKSRGKLQLVVLRDSQQTLINIPSLNDSDSEIEDISEIESNRSFSPEERRHQYSDYDYHSSSEKLKERPSSREDTPSRLSRMGATPTPFKSTGDIAGTVVPETNKEPRYQEDPPAPQPKAAPRTFLRPSPEDEAIYGPNTKMVRFKKGDSVGLRLAGGNDVGIFVAGIQEGTSAEQEGLQEGDQILKVNTQDFRGLVREDAVLYLLEIPKGEMVTILAQSRADVYRDILACGRGDSFFIRSHFECEKETPQSLAFTRGEVFRVVDTLYDGKLGNWLAVRIGNELEKGLIPNKSRAEQMASVQNAQRDNAGDRADFWRMRGQRSGVKKNLRKSREDLTAVVSVSTKFPAYERVLLREAGFKRPVVLFGPIADIAMEKLANELPDWFQTAKTEPKDAGSEKSTGVVRLNTVRQIIEQDKHALLDVTPKAVDLLNYTQWFPIVIFFNPDSRQGVKTMRQRLNPTSNKSSRKLFDQANKLKKTCAHLFTATINLNSANDSWFGSLKDTIQHQQGEAVWVSEGKMEGMDDDPEDRMSYLTAMGADYLSCDSRLISDFEDTDGEGGAYTDNELDEPAEEPLVSSITRSSEPVQHEESIRKPSPEPRAQMRRAASSDQLRDNSPPPAFKPEPPKAKTQNKEESYDFSKSYEYKSNPSAVAGNETPGASTKGYPPPVAAKPTFGRSILKPSTPIPPQEGEEVGESSEEQDNAPKSVLGKVKIFEKMDHKARLQRMQELQEAQNARIEIAQKHPDIYAVPIKTHKPDPGTPQHTSSRPPEPQKAPSRPYQDTRGSYGSDAEEEEYRQQLSEHSKRGYYGQSARYRDTEL

SEQ ID NO: 212 - DNA, 4720 bp, Homo sapiens
gacgcggttcgccgcaggagcctcgaaggcgcggcgccggcgagcccttccccggcaggcgcgtgggtggtagcggccaatttgacagtttcccgggccgggcggccagcgcggaggcgccacgctcgggtcgggggcgggctgacgccgccgccgccgcgggaggagggacaaaggggtgggtccccgcgggtcggcaccccggcggttgggctgcgggtcagagcactgtccggtggtgcccaggaggagtaggagcaggagcagaagcagaagcggggtccggagctgcgcgcctacgcgggacctgtgtccgaaatgccggtgcgaggagaccgcgggtttccaccccggcgggagctgtcaggttggctccgcgccccaggcatggaagagctgatatgggaacagtacactgtgaccctacaaaaggattccaaaagaggatttggaattgcagtgtccggaggcagagacaacccccactttgaaaatggagaaacgtcaattgtcatttctgatgtgctcccgggtgggcctgctgatgggctgctccaagaaaatgacagagtggtcatggtcaatggcacccccatggaggatgtgcttcattcgtttgcagttcagcagctcagaaaaagtgggaaggtcgctgctattgtggtcaagaggccccggaaggtccaggtggccgcacttcaggccagccctcccctggatcaggatgaccgggcttttgaggtgatggacgagtttgatggcagaagtttccggagtggctacagcgagaggagccggctgaacagccatggggggcgcagccgcagctgggaggacagcccggaaagggggcgtccccatgagcgggcccggagccgggagcgggacctcagccgggaccggagccgtggccggagcctggagcggggcctggaccaagaccatgcgcgcacccgagaccgcagccgtggccggagcctggagcggggcctggaccacgactttgggccatcccgggaccgggaccgtgaccgcagccgcggccggagcattgaccaggactacgagcgagcctatcaccgggcctacgacccagactacgagcgggcctacagcccggagtacaggcgcggggcccgccacgatgcccgctctcggggaccccgaagccgcagccgcgagcacccgcactcacggagccccagccccgagcctagggggcggccggggcccatcggggtcctcctgatgaaaagcagagcgaacgaagagtatggtctccggcttgggagtcagatcttcgtaaaggaaatgacccgaacgggtctggcaactaaagatggcaaccttcacgaaggagacataattctcaagatcaatgggactgtaactgagaacatgtctttaacggatgctcgaaaattgatagaaaagtcaagaggaaaactacagctagtggtgttgagagacagccagcagaccctcatcaacatcccgtcattaaatgacagtgactcagaaatagaagatatttcagaaatagagtcaaaccgatcattttctccagaggagagacgtcatcagtattctgattatgattatcattcctcaagtgagaagctgaaggaaaggccaagttccagagaggacacgccgagcagattgtccaggatgggtgcgacacccactccctttaagtccacaggggatattgcaggcacagttgtcccagagaccaacaaggaacccagataccaagaggaccccccagctcctcaaccaaaagcagccccgagaacttttcttcgtcctagtcctgaagatgaagcaatatatggccctaataccaaaatggtaaggttcaagaagggagacagcgtgggcctccggttggctggtggcaatgatgtcgggatatttgttgctggcattcaagaagggacctcggcggagcaggagggccttcaagaaggagaccagattctgaaggtgaacacacaggatttcagaggattagtgcgggaggatgccgttctctacctgttagaaatccctaaaggtgaaatggtgaccattttagctcagagccgagccgatgtgtatagagacatcctggcttgtggcagaggggattcgttttttataagaagccactttgaatgtgagaaggaaactccacagagcctggccttcaccagaggggaggtcttccgagtggtagacacactgtatgacggcaagctgggcaactggctggctgtgaggattgggaacgagttggagaaaggcttaatccccaacaagagcagagctgaacaaatggccagtgttcaaaatgcccagagagacaacgctggggaccgggcagatttctggagaatgcgtggccagaggtctggggtgaagaagaacctgaggaaaagtcgggaagacctcacagctgttgtgtctgtcagcaccaagttcccagcttatgagagggttttgctgcgagaagctggtttcaagagacctgtggtcttattcggccccatagctgatatagcaatggaaaaattggctaatgagttacctgactggtttcaaactgctaaaacggaaccaaaagatgcaggatctgagaaatccactggagtggtccggttaaataccgtgaggcaaattattgaacaggataagcatgcactactggatgtgactccgaaagctgtggacctgttgaattacacccagtggttcccaattgtgatttttttcaacccagactccagacaaggtgtcaaaaccatgagacaaaggttaaatccaacgtccaacaaaagttctcgaaagttatttgatcaagccaacaagcttaaaaaaacgtgtgcacacctttttacagctacaatcaacctaaattcagccaatgatagctggtttggcagcttaaaggacactattcagcatcagcaaggagaagcggtttgggtctctgaaggaaagatggaagggatggatgatgaccccgaagaccgcatgtcctacttaaccgccatgggcgcggactatctgagttgcgacagccgcctcatcagtgactttgaagacacggacggtgaaggaggcgcctacactgacaatgagctggatgagccagccgaggagccgctggtgtcgtccatcacccgctcctcggagccggtgcagcacgaggaggtgaggcgaggcaggccacgggcaggaacaggagagcctggtgttttccttgcactctcgtggacagctgtgtgttcagggtgctgtggaaggcattcctaagggttggagcagatgacttccagggagtctctcgctttgagtccacgctggcatggttgcagtctgtgggaaagtggggcaggcaggtggacttcagaagagcttgaggggtcagcactccgcacacccatgccctcaggtgcgatggataaacagaatggctttaggtgccgtctgtccaaattaccagcggaaccttccttcccatgcagtattgttgtatgtacttgtaacctttgattaggtttctctctgtactcttagatgtccttgcttttcttccccatcctgcctttaacctttctaatcttgccaaagctcttgagtgtttccccatcagtttccttctctcttatatttcagttttttaattgagttcatgatcaaaccttcatctgatcacatcacatgtactgtgcatccactgtgattagatagcttatgggatccttgaaatcacattgacaggcactgtaaagtcacagccaagttagcaattattagttgcacctcagagaatgttggaataatgatctttgaagatgggattgttcatatatttggataattattgctgtggatttctctctagcattttagctcattccagtaaatgatttttttctttatgaaatagaactaccaaaaaaaaaaaaaaaaaaaagttcaacaacaacaaactgaagggggagaaaaatacaccattaccacagcaacaaattagtttatgctagacaacttgtaaagaataaattaacttccaaatgcctatagacatggatattagtgacacaagagattttagacttttggagggttcttaaaaaattgtgctttaaaggaagagactctacattggatgcagccagtttttaaaaatgtgtctgaagcatttggtgatggtttctgcctgttcagtaaagaagcaccggctcagaacctcaacttctggacttactcaagtttgcagaactcctccaaagcagtcgagtgctctgttctctctgcttggatgttcttgttgtgaatgaacctttatgtcttgtagagcataaggaaacccagcccagagccacgagctcagatgaggagggctgctagcagcgatcaacttagggacaatagcccgcccccagcattcaagccagagccgcccaaggtacgtggctgggaagcccaggatgggaaggaagaggaagcagatgcctctgaagcctcctggacggccagggaggagcatgcacactgagatggtgtttaattacggttctgactcactgtgttctctattagagcctatcttttggcctgttgggtgaactcccaaattagggaagggcaaaaaggaaggaaaggcaatattaggagagcatatgattttaggactgttagtgtttatttaatttactcttcttgttaa

SEQ ID NO: 213 - protein, 993 aa, Homo sapiens
MPVRGDRGFPPRRELSGWLRAPGMEELIWEQYTVTLQKDSKRGFGIAVSGGRDNPHFENGETSIVISDVLPGGPADGLLQENDRVVMVNGTPMEDVLHSFAVQQLRKSGKVAAIVVKRPRKVQVAALQASPPLDQDDRAFEVMDEFDGRSFRSGYSERSRLNSHGGRSRSWEDSPERGRPHERARSRERDLSRDRSRGRSLERGLDQDHARTRDRSRGRSLERGLDHDFGPSRDRDRDRSRGRSIDQDYERAYHRAYDPDYERAYSPEYRRGARHDARSRGPRSRSREHPHSRSPSPEPRGRPGPIGVLLMKSRANEEYGLRLGSQIFVKEMTRTGLATKDGNLHEGDIILKINGTVTENMSLTDARKLIEKSRGKLQLVVLRDSQQTLINIPSLNDSDSEIEDISEIESNRSFSPEERRHQYSDYDYHSSSEKLKERPSSREDTPSRLSRMGATPTPFKSTGDIAGTVVPETNKEPRYQEDPPAPQPKAAPRTFLRPSPEDEAIYGPNTKMVRFKKGDSVGLRLAGGNDVGIFVAGIQEGTSAEQEGLQEGDQILKVNTQDFRGLVREDAVLYLLEIPKGEMVTILAQSRADVYRDILACGRGDSFFIRSHFECEKETPQSLAFTRGEVFRVVDTLYDGKLGNWLAVRIGNELEKGLIPNKSRAEQMASVQNAQRDNAGDRADFWRMRGQRSGVKKNLRKSREDLTAVVSVSTKFPAYERVLLREAGFKRPVVLFGPIADIAMEKLANELPDWFQTAKTEPKDAGSEKSTGVVRLNTVRQIIEQDKHALLDVTPKAVDLLNYTQWFPIVIFFNPDSRQGVKTMRQRLNPTSNKSSRKLFDQANKLKKTCAHLFTATINLNSANDSWFGSLKDTIQHQQGEAVWVSEGKMEGMDDDPEDRMSYLTAMGADYLSCDSRLISDFEDTDGEGGAYTDNELDEPAEEPLVSSITRSSEPVQHEEVRRGRPRAGTGEPGVFLALSWTAVCSGCCGRHS

SEQ ID NO: 214 - DNA, 4725 bp, Homo sapiens
gacgcggttcgccgcaggagcctcgaaggcgcggcgccggcgagcccttccccggcaggcgcgtgggtggtagcggccaatttgacagtttcccgggccgggcggccagcgcggaggcgccacgctcgggtcgggggcgggctgacgccgccgccgccgcgggaggagggacaaaggggtgggtccccgcgggtcggcaccccggcggttgggctgcgggtcagagcactgtccggtggtgcccaggaggagtaggagcaggagcagaagcagaagcggggtccggagctgcgcgcctacgcgggacctgtgtccgaaatgccggtgcgaggagaccgcgggtttccaccccggcgggagctgtcaggttggctccgcgccccaggcatggaagagctgatatgggaacagtacactgtgaccctacaaaaggattccaaaagaggatttggaattgcagtgtccggaggcagagacaacccccactttgaaaatggagaaacgtcaattgtcatttctgatgtgctcccgggtgggcctgctgatgggctgctccaagaaaatgacagagtggtcatggtcaatggcacccccatggaggatgtgcttcattcgtttgcagttcagcagctcagaaaaagtgggaaggtcgctgctattgtggtcaagaggccccggaaggtccaggtggccgcacttcaggccagccctcccctggatcaggatgaccgggcttttgaggtgatggacgagtttgatggcagaagtttccggagtggctacagcgagaggagccggctgaacagccatggggggcgcagccgcagctgggaggacagcccggaaagggggcgtccccatgagcgggcccggagccgggagcgggacctcagccgggaccggagccgtggccggagcctggagcggggcctggaccaagaccatgcgcgcacccgagaccgcagccgtggccggagcctggagcggggcctggaccacgactttgggccatcccgggaccgggaccgtgaccgcagccgcggccggagcattgaccaggactacgagcgagcctatcaccgggcctacgacccagactacgagcgggcctacagcccggagtacaggcgcggggcccgccacgatgcccgctctcggggaccccgaagccgcagccgcgagcacccgcactcacggagccccagccccgagcctagggggcggccggggcccatcggggtcctcctgatgaaaagcagagcgaacgaagagtatggtctccggcttgggagtcagatcttcgtaaaggaaatgacccgaacgggtctggcaactaaagatggcaaccttcacgaaggagacataattctcaagatcaatgggactgtaactgagaacatgtctttaacggatgctcgaaaattgatagaaaagtcaagaggaaaactacagctagtggtgttgagagacagccagcagaccctcatcaacatcccgtcattaaatgacagtgactcagaaatagaagatatttcagaaatagagtcaaaccgatcattttctccagaggagagacgtcatcagtattctgattatgattatcattcctcaagtgagaagctgaaggaaaggccaagttccagagaggacacgccgagcagattgtccaggatgggtgcgacacccactccctttaagtccacaggggatattgcaggcacagttgtcccagagaccaacaaggaacccagataccaagaggaccccccagctcctcaaccaaaagcagccccgagaacttttcttcgtcctagtcctgaagatgaagcaatatatggccctaataccaaaatggtaaggttcaagaagggagacagcgtgggcctccggttggctggtggcaatgatgtcgggatatttgttgctggcattcaagaagggacctcggcggagcaggagggccttcaagaaggagaccagattctgaaggtgaacacacaggatttcagaggattagtgcgggaggatgccgttctctacctgttagaaatccctaaaggtgaaatggtgaccattttagctcagagccgagccgatgtgtatagagacatcctggcttgtggcagaggggattcgttttttataagaagccactttgaatgtgagaaggaaactccacagagcctggccttcaccagaggggaggtcttccgagtggtagacacactgtatgacggcaagctgggcaactggctggctgtgaggattgggaacgagttggagaaaggcttaatccccaacaagagcagagctgaacaaatggccagtgttcaaaatgcccagagagacaacgctggggaccgggcagatttctggagaatgcgtggccagaggtctggggtgaagaagaacctgaggaaaagtcgggaagacctcacagctgttgtgtctgtcagcaccaagttcccagcttatgagagggttttgctgcgagaagctggtttcaagagacctgtggtcttattcggccccatagctgatatagcaatggaaaaattggctaatgagttacctgactggtttcaaactgctaaaacggaaccaaaagatgcaggatctgagaaatccactggagtggtccggttaaataccgtgaggcaaattattgaacaggataagcatgcactactggatgtgactccgaaagctgtggacctgttgaattacacccagtggttcccaattgtgatttttttcaacccagactccagacaaggtgtcaaaaccatgagacaaaggttaaatccaacgtccaacaaaagttctcgaaagttatttgatcaagccaacaagcttaaaaaaacgtgtgcacacctttttacagctacaatcaacctaaattcagccaatgatagctggtttggcagcttaaaggacactattcagcatcagcaaggagaagcggtttgggtctctgaaggaaagatggaagggatggatgatgaccccgaagaccgcatgtcctacttaaccgccatgggcgcggactatctgagttgcgacagccgcctcatcagtgactttgaagacacggacggtgaaggaggcgcctacactgacaatgagctggatgagccagccgaggagccgctggtgtcgtccatcacccgctcctcggagccggtgcagcacgaggagagcataaggaaacccagcccagagccacgagctcagatgaggagggctgctagcagcgatcaacttagggacaatagcccgcccccagcattcaagccagagccgcccaaggccaaaacccagaacaaagaagaatcctatgacttctccaaatcctatgaatataagtcaaacccctctgccgttgctggtaatgaaactcctggggcatctaccaaaggttatcctcctcctgttgcagcaaaacctacctttgggcggtctatactgaagccctccactcccatccctcctcaagagggtgaggaggtgggagagagcagtgaggagcaagataatgctcccaaatcagtcctgggcaaagtcaaaatatttgagaagatggatcacaaggccaggttacagagaatgcaggagctccaggaagcacagaatgcaaggatcgaaattgcccagaagcatcctgatatctatgcagttccaatcaaaacgcacaagccagaccctggcacgccccagcacacgagttccagaccccctgagccacagaaagctccttccagaccttatcaggataccagaggaagttatggcagtgatgccgaggaggaggagtaccgccagcagctgtcagaacactccaagcgcggttactatggccagtctgcccgataccgggacacagaattatagatgtctgagcacggactctcccaggcctgcctgcatggcatcagactagccactcctgccaggccgccgggatggttcttctccagttagaatgcaccatggagacgtggtgggactccagctcgtgtgtcctcatggagaacccaggggacagctggtgcaaattcagaactgagggctctgtttgtgggactgggttagaggagtctgtggctttttgttcagaattaagcagaacactgcagtcagatcctgttacttgcttcagtggaccgaaatctgtattctgtttgcgtacttgtaatatgtatattaagaagcaataactatttttcctcattaatagctgccttcaaggactgtttcagtgtgagtcagaatgtgaaaaaggaataaaaaatactgttgggctcaaactaaattcaaagaagtactttattgcaactcttttaagtgccttggatgagaagtgtcttaaattttcttcctttgaagctttaggcagagccataatggactaaaacattttgactaagtttttataccagcttaatagctgtagttttccctgcactgtgtcatcttttcaaggcatttgtctttgtaatattttccataaatttggactgtctatatcataactatacttgatagtttggctataagtgctcaatagcttgaagcccaagaagttggtatcgaaatttgttgtttgtttaaacccaagtgctgcacaaaagcagatacttgaggaaaacactatttccaaaagcacatgtattgacaacagttttataatttaataaaaaggaatacattgcaatccgtaatttt

SEQ ID NO: 215 - protein, 1190 aa, Homo sapiens
MPVRGDRGFPPRRELSGWLRAPGMEELIWEQYTVTLQKDSKRGFGIAVSGGRDNPHFENGETSIVISDVLPGGPADGLLQENDRVVMVNGTPMEDVLHSFAVQQLRKSGKVAAIVVKRPRKVQVAALQASPPLDQDDRAFEVMDEFDGRSFRSGYSERSRLNSHGGRSRSWEDSPERGRPHERARSRERDLSRDRSRGRSLERGLDQDHARTRDRSRGRSLERGLDHDFGPSRDRDRDRSRGRSIDQDYERAYHRAYDPDYERAYSPEYRRGARHDARSRGPRSRSREHPHSRSPSPEPRGRPGPIGVLLMKSRANEEYGLRLGSQIFVKEMTRTGLATKDGNLHEGDIILKINGTVTENMSLTDARKLIEKSRGKLQLVVLRDSQQTLINIPSLNDSDSEIEDISEIESNRSFSPEERRHQYSDYDYHSSSEKLKERPSSREDTPSRLSRMGATPTPFKSTGDIAGTVVPETNKEPRYQEDPPAPQPKAAPRTFLRPSPEDEAIYGPNTKMVRFKKGDSVGLRLAGGNDVGIFVAGIQEGTSAEQEGLQEGDQILKVNTQDFRGLVREDAVLYLLEIPKGEMVTILAQSRADVYRDILACGRGDSFFIRSHFECEKETPQSLAFTRGEVFRVVDTLYDGKLGNWLAVRIGNELEKGLIPNKSRAEQMASVQNAQRDNAGDRADFWRMRGQRSGVKKNLRKSREDLTAVVSVSTKFPAYERVLLREAGFKRPVVLFGPIADIAMEKLANELPDWFQTAKTEPKDAGSEKSTGVVRLNTVRQIIEQDKHALLDVTPKAVDLLNYTQWFPIVIFFNPDSRQGVKTMRQRLNPTSNKSSRKLFDQANKLKKTCAHLFTATINLNSANDSWFGSLKDTIQHQQGEAVWVSEGKMEGMDDDPEDRMSYLTAMGADYLSCDSRLISDFEDTDGEGGAYTDNELDEPAEEPLVSSITRSSEPVQHEESIRKPSPEPRAQMRRAASSDQLRDNSPPPAFKPEPPKAKTQNKEESYDFSKSYEYKSNPSAVAGNETPGASTKGYPPPVAAKPTFGRSILKPSTPIPPQEGEEVGESSEEQDNAPKSVLGKVKIFEKMDHKARLQRMQELQEAQNARIEIAQKHPDIYAVPIKTHKPDPGTPQHTSSRPPEPQKAPSRPYQDTRGSYGSDAEEEEYRQQLSEHSKRGYYGQSARYRDTEL

SEQ ID NO: 216 - DNA, 4284 bp, Homo sapiens
gacgcggttcgccgcaggagcctcgaaggcgcggcgccggcgagcccttccccggcaggcgcgtgggtggtagcggccaatttgacagtttcccgggccgggcggccagcgcggaggcgccacgctcgggtcgggggcgggctgacgccgccgccgccgcgggaggagggacaaaggggtgggtccccgcgggtcggcaccccggcggttgggctgcgggtcagagcactgtccggtggtgcccaggaggagtaggagcaggagcagaagcagaagcggggtccggagctgcgcgcctacgcgggacctgtgtccgaaatgccggtgcgaggagaccgcgggtttccaccccggcgggagctgtcaggttggctccgcgccccaggcatggaagagctgatatgggaacagtacactgtgaccctacaaaaggattccaaaagaggatttggaattgcagtgtccggaggcagagacaacccccactttgaaaatggagaaacgtcaattgtcatttctgatgtgctcccgggtgggcctgctgatgggctgctccaagaaaatgacagagtggtcatggtcaatggcacccccatggaggatgtgcttcattcgtttgcagttcagcagctcagaaaaagtgggaaggtcgctgctattgtggtcaagaggccccggaaggtccaggtggccgcacttcaggccagccctcccctggatcaggatgaccgggcttttgaggtgatggacgagtttgatggcagaagtttccggagtggctacagcgagaggagccggctgaacagccatggggggcgcagccgcagctgggaggacagcccggaaagggggcgtccccatgagcgggcccggagccgggagcgggacctcagccgggaccggagccgtggccggagcctggagcggggcctggaccaagaccatgcgcgcacccgagaccgcagccgtggccggagcctggagcggggcctggaccacgactttgggccatcccgggaccgggaccgtgaccgcagccgcggccggagcattgaccaggactacgagcgagcctatcaccgggcctacgacccagactacgagcgggcctacagcccggagtacaggcgcggggcccgccacgatgcccgctctcggggaccccgaagccgcagccgcgagcacccgcactcacggagccccagccccgagcctagggggcggccggggcccatcggggtcctcctgatgaaaagcagagcgaacgaagagtatggtctccggcttgggagtcagatcttcgtaaaggaaatgacccgaacgggtctggcaactaaagatggcaaccttcacgaaggagacataattctcaagatcaatgggactgtaactgagaacatgtctttaacggatgctcgaaaattgatagaaaagtcaagaggaaaactacagctagtggtgttgagagacagccagcagaccctcatcaacatcccgtcattaaatgacagtgactcagaaatagaagatatttcagaaatagagtcaaaccgatcattttctccagaggagagacgtcatcagtattctgattatgattatcattcctcaagtgagaagctgaaggaaaggccaagttccagagaggacacgccgagcagattgtccaggatgggtgcgacacccactccctttaagtccacaggggatattgcaggcacagttgtcccagagaccaacaaggaacccagataccaagaggaccccccagctcctcaaccaaaagcagccccgagaacttttcttcgtcctagtcctgaagatgaagcaatatatggccctaataccaaaatggtaaggttcaagaagggagacagcgtgggcctccggttggctggtggcaatgatgtcgggatatttgttgctggcattcaagaagggacctcggcggagcaggagggccttcaagaaggagaccagattctgaaggtgaacacacaggatttcagaggattagtgcgggaggatgccgttctctacctgttagaaatccctaaaggtgaaatggtgaccattttagctcagagccgagccgatgtgtatagagacatcctggcttgtggcagaggggattcgttttttataagaagccactttgaatgtgagaaggaaactccacagagcctggccttcaccagaggggaggtcttccgagtggtagacacactgtatgacggcaagctgggcaactggctggctgtgaggattgggaacgagttggagaaaggcttaatccccaacaagagcagagctgaacaaatggccagtgttcaaaatgcccagagagacaacgctggggaccgggcagatttctggagaatgcgtggccagaggtctggggtgaagaagaacctgaggaaaagtcgggaagacctcacagctgttgtgtctgtcagcaccaagttcccagcttatgagagggttttgctgcgagaagctggtttcaagagacctgtggtcttattcggccccatagctgatatagcaatggaaaaattggctaatgagttacctgactggtttcaaactgctaaaacggaaccaaaagatgcaggatctgagaaatccactggagtggtccggttaaataccgtgaggcaaattattgaacaggataagcatgcactactggatgtgactccgaaagctgtggacctgttgaattacacccagtggttcccaattgtgatttttttcaacccagactccagacaaggtgtcaaaaccatgagacaaaggttaaatccaacgtccaacaaaagttctcgaaagttatttgatcaagccaacaagcttaaaaaaacgtgtgcacacctttttacagctacaatcaacctaaattcagccaatgatagctggtttggcagcttaaaggacactattcagcatcagcaaggagaagcggtttgggtctctgaaggaaagatggaagggatggatgatgaccccgaagaccgcatgtcctacttaaccgccatgggcgcggactatctgagttgcgacagccgcctcatcagtgactttgaagacacggacggtgaaggaggcgcctacactgacaatgagctggatgagccagccgaggagccgctggtgtcgtccatcacccgctcctcggagccggtgcagcacgaggagatcgaaattgcccagaagcatcctgatatctatgcagttccaatcaaaacgcacaagccagaccctggcacgccccagcacacgagttccagaccccctgagccacagaaagctccttccagaccttatcaggataccagaggaagttatggcagtgatgccgaggaggaggagtaccgccagcagctgtcagaacactccaagcgcggttactatggccagtctgcccgataccgggacacagaattatagatgtctgagcacggactctcccaggcctgcctgcatggcatcagactagccactcctgccaggccgccgggatggttcttctccagttagaatgcaccatggagacgtggtgggactccagctcgtgtgtcctcatggagaacccaggggacagctggtgcaaattcagaactgagggctctgtttgtgggactgggttagaggagtctgtggctttttgttcagaattaagcagaacactgcagtcagatcctgttacttgcttcagtggaccgaaatctgtattctgtttgcgtacttgtaatatgtatattaagaagcaataactatttttcctcattaatagctgccttcaaggactgtttcagtgtgagtcagaatgtgaaaaaggaataaaaaatactgttgggctcaaactaaattcaaagaagtactttattgcaactcttttaagtgccttggatgagaagtgtcttaaattttcttcctttgaagctttaggcagagccataatggactaaaacattttgactaagtttttataccagcttaatagctgtagttttccctgcactgtgtcatcttttcaaggcatttgtctttgtaatattttccataaatttggactgtctatatcataactatacttgatagtttggctataagtgctcaatagcttgaagcccaagaagttggtatcgaaatttgttgtttgtttaaacccaagtgctgcacaaaagcagatacttgaggaaaacactatttccaaaagcacatgtattgacaacagttttataatttaataaaaaggaatacattgcaatccgtaatttt

SEQ ID NO: 217 - protein, 1043 aa, Homo sapiens
MPVRGDRGFPPRRELSGWLRAPGMEELIWEQYTVTLQKDSKRGFGIAVSGGRDNPHFENGETSIVISDVLPGGPADGLLQENDRVVMVNGTPMEDVLHSFAVQQLRKSGKVAAIVVKRPRKVQVAALQASPPLDQDDRAFEVMDEFDGRSFRSGYSERSRLNSHGGRSRSWEDSPERGRPHERARSRERDLSRDRSRGRSLERGLDQDHARTRDRSRGRSLERGLDHDFGPSRDRDRDRSRGRSIDQDYERAYHRAYDPDYERAYSPEYRRGARHDARSRGPRSRSREHPHSRSPSPEPRGRPGPIGVLLMKSRANEEYGLRLGSQIFVKEMTRTGLATKDGNLHEGDIILKINGTVTENMSLTDARKLIEKSRGKLQLVVLRDSQQTLINIPSLNDSDSEIEDISEIESNRSFSPEERRHQYSDYDYHSSSEKLKERPSSREDTPSRLSRMGATPTPFKSTGDIAGTVVPETNKEPRYQEDPPAPQPKAAPRTFLRPSPEDEAIYGPNTKMVRFKKGDSVGLRLAGGNDVGIFVAGIQEGTSAEQEGLQEGDQILKVNTQDFRGLVREDAVLYLLEIPKGEMVTILAQSRADVYRDILACGRGDSFFIRSHFECEKETPQSLAFTRGEVFRVVDTLYDGKLGNWLAVRIGNELEKGLIPNKSRAEQMASVQNAQRDNAGDRADFWRMRGQRSGVKKNLRKSREDLTAVVSVSTKFPAYERVLLREAGFKRPVVLFGPIADIAMEKLANELPDWFQTAKTEPKDAGSEKSTGVVRLNTVRQIIEQDKHALLDVTPKAVDLLNYTQWFPIVIFFNPDSRQGVKTMRQRLNPTSNKSSRKLFDQANKLKKTCAHLFTATINLNSANDSWFGSLKDTIQHQQGEAVWVSEGKMEGMDDDPEDRMSYLTAMGADYLSCDSRLISDFEDTDGEGGAYTDNELDEPAEEPLVSSITRSSEPVQHEEIEIAQKHPDIYAVPIKTHKPDPGTPQHTSSRPPEPQKAPSRPYQDTRGSYGSDAEEEEYRQQLSEHSKRGYYGQSARYRDTEL

SEQ ID NO: 218 - DNA, 2630 bp, Homo sapiens
ataaggccctctcctccaccctgccaggctcactctgccccacagccacagcccctgactgccgcagcccccacagagcccgccgcgcaccccacgtcccccacgccagcgcccagccatggaggccatcaagaagaaaatgcagatgctgaagttggacaaggagaatgccatcgaccgcgcggagcaggcggaggcggataagaaagccgctgaggacaagtgcaagcaggtggaggaggagctgacgcacctccagaagaaactaaaagggacagaggacgagctggataaatattccgaggacctgaaggacgcgcaggagaagctggagctcacggagaagaaggcctccgacgctgaaggtgatgtggccgccctcaaccgacgcatccagctcgttgaggaggagttggacagggctcaggaacgactggccacggccctgcagaagctggaggaggcagaaaaagctgcagatgagagtgagagaggaatgaaggtgatagaaaaccgggccatgaaggatgaggagaagatggagattcaggagatgcagctcaaagaggccaagcacattgcggaagaggctgaccgcaaatacgaggaggtagctcgtaagctggtcatcctggagggtgagctggagagggcagaggagcgtgcggaggtgtctgaactaaaatgtggtgacctggaagaagaactcaagaatgttactaacaatctgaaatctctggaggctgcatctgaaaagtattctgaaaaggaggacaaatatgaagaagaaattaaacttctgtctgacaaactgaaagaggctgagacccgtgctgaatttgcagagagaacggttgcaaaactggaaaagacaattgatgacctggaagagaaacttgcccaggccaaagaagagaacgtgggcttacatcagacactggatcagacactaaacgaacttaactgtatataagcaaaacagaagagtcttgttccaacagaaactctggagctccgtgggtctttctcttctcttgtaagaagttccttttgttattgccatcttcgctttgctggaaatgtcaagcaaattatgaatacatgaccaaatattttgtatcggagaagctttgagcaccagttaaatctcattccttccctttttttttcaaatggcaccagctttttcagctctcttattttttccttaagtagcatttattcctaaggtaggcagggtatttcctagtaagcatactttcttaagacggaggccatttggttcctgggagaataggcagccccacactttgaagaatacagaccccagtatctagtcgtggatataattaaaacgctgaagaccataaccttttgggtcaactgttggtcaaactataggagagaccagggaccatcacatgggtagggattttccatccagagccaataaaaggactggtgggggccgggggtggctattgtgggaagtcataacccacagatagatcaacctaagaatcctggcccttctccactctccaccatgcaggacaaacatcttctcaagcagtcaacgtagaatgcttgggaaatagtcataattacccacatatagtaattaatagatggtaattaattgatccttgatgtgatgttcttttgcatatttccttcattctaaagttgttccctggccgggagcgttggctttcgcctgtaatcccaacactttgggaggccaggacagatcacttgaggtcaggagttcgagaccagcccagccaacatggcgaaaccatgtctctactaaaaatacaaaaattatggtgacgcctgcctgtagtcccagctactcgggaggctgaggcaggaggatcgcttgaacccaggaagtggagactgcagtgagccgatatcgcaccacagcgctccagcctggtcgacagagtgagactccatctcaagaaaaaataaaaataaagttgttctctgaagagcaaatgtctcattccagtaatgacccactcagcaggaatatggtggagttcagtccaattcaggtcagccatatccaaaagaccacaagtcattactaagttgagcaaaagagtttttatctattagcagaaagggcctctctggcagcagagattaaaaactggcccaacttcatttccatacttcagggaacagcaaattgaggatttacttatctaggacttgaattccttctttgggaccaagttaataaaagaccaagaaactcctgattaaactggataatgaaggattctgtagacagggctgcacgtatcggctttgtttgacttctcttttctcagttaacatctcagagctagaacattccacattccccagcagcgtgtgggggctgactaaagtttacaattccaactaaaaatcaccctgcttctggcttatctgaatcccttacccaccccaccccaccaccctactcctatttattcagcaccacactacccaggaaatacactagcaaattgtgcaatggaataaaatccacactttagattcttgcaactgtatcatatgtaatagtatcactttttctacattttggtcaaataaatttttacataaactac

SEQ ID NO: 219 - protein, 284 aa, Homo sapiens
MEAIKKKMQMLKLDKENAIDRAEQAEADKKAAEDKCKQVEEELTHLQKKLKGTEDELDKYSEDLKDAQEKLELTEKKASDAEGDVAALNRRIQLVEEELDRAQERLATALQKLEEAEKAADESERGMKVIENRAMKDEEKMEIQEMQLKEAKHIAEEADRKYEEVARKLVILEGELERAEERAEVSELKCGDLEEELKNVTNNLKSLEAASEKYSEKEDKYEEEIKLLSDKLKEAETRAEFAERTVAKLEKTIDDLEEKLAQAKEENVGLHQTLDQTLNELNCI

SEQ ID NO: 220 - DNA, 2645 bp, Homo sapiens
tttccagcagctgtggccagcggtgccgacgtcaggccctcccccagcggtgctgacgtcggcggtccggccgggtgacctcatcgccccgacggcagccggcccggggggcggggagaggcgggggcggcccccgcgcaggcaaaggcttggggggccggggcgcggctgtgcagctctcgccggagccgagcccagccgagcgtccgccgctgcccgtgcgcctctgcgcctccgcgccatggccggcctcaactccctggaggcggtgaaacgcaagatccaggccctgcagcagcaggcggacgaggcggaagaccgcgcgcagggcctgcagcgggagctggacggcgagcgcgagcggcgcgagaaagctgaaggtgatgtggccgccctcaaccgacgcatccagctcgttgaggaggagttggacagggctcaggaacgactggccacggccctgcagaagctggaggaggcagaaaaagctgcagatgagagtgagagaggaatgaaggtgatagaaaaccgggccatgaaggatgaggagaagatggagattcaggagatgcagctcaaagaggccaagcacattgcggaagaggctgaccgcaaatacgaggaggtagctcgtaagctggtcatcctggagggtgagctggagagggcagaggagcgtgcggaggtgtctgaactaaaatgtggtgacctggaagaagaactcaagaatgttactaacaatctgaaatctctggaggctgcatctgaaaagtattctgaaaaggaggacaaatatgaagaagaaattaaacttctgtctgacaaactgaaagaggctgagacccgtgctgaatttgcagagagaacggttgcaaaactggaaaagacaattgatgacctggaagagaaacttgcccaggccaaagaagagaacgtgggcttacatcagacactggatcagacactaaacgaacttaactgtatataagcaaaacagaagagtcttgttccaacagaaactctggagctccgtgggtctttctcttctcttgtaagaagttccttttgttattgccatcttcgctttgctggaaatgtcaagcaaattatgaatacatgaccaaatattttgtatcggagaagctttgagcaccagttaaatctcattccttccctttttttttcaaatggcaccagctttttcagctctcttattttttccttaagtagcatttattcctaaggtaggcagggtatttcctagtaagcatactttcttaagacggaggccatttggttcctgggagaataggcagccccacactttgaagaatacagaccccagtatctagtcgtggatataattaaaacgctgaagaccataaccttttgggtcaactgttggtcaaactataggagagaccagggaccatcacatgggtagggattttccatccagagccaataaaaggactggtgggggccgggggtggctattgtgggaagtcataacccacagatagatcaacctaagaatcctggcccttctccactctccaccatgcaggacaaacatcttctcaagcagtcaacgtagaatgcttgggaaatagtcataattacccacatatagtaattaatagatggtaattaattgatccttgatgtgatgttcttttgcatatttccttcattctaaagttgttccctggccgggagcgttggctttcgcctgtaatcccaacactttgggaggccaggacagatcacttgaggtcaggagttcgagaccagcccagccaacatggcgaaaccatgtctctactaaaaatacaaaaattatggtgacgcctgcctgtagtcccagctactcgggaggctgaggcaggaggatcgcttgaacccaggaagtggagactgcagtgagccgatatcgcaccacagcgctccagcctggtcgacagagtgagactccatctcaagaaaaaataaaaataaagttgttctctgaagagcaaatgtctcattccagtaatgacccactcagcaggaatatggtggagttcagtccaattcaggtcagccatatccaaaagaccacaagtcattactaagttgagcaaaagagtttttatctattagcagaaagggcctctctggcagcagagattaaaaactggcccaacttcatttccatacttcagggaacagcaaattgaggatttacttatctaggacttgaattccttctttgggaccaagttaataaaagaccaagaaactcctgattaaactggataatgaaggattctgtagacagggctgcacgtatcggctttgtttgacttctcttttctcagttaacatctcagagctagaacattccacattccccagcagcgtgtgggggctgactaaagtttacaattccaactaaaaatcaccctgcttctggcttatctgaatcccttacccaccccaccccaccaccctactcctatttattcagcaccacactacccaggaaatacactagcaaattgtgcaatggaataaaatccacactttagattcttgcaactgtatcatatgtaatagtatcactttttctacattttggtcaaataaatttttacataaactac

SEQ ID NO: 221 - protein, 248 aa, Homo sapiens
MAGLNSLEAVKRKIQALQQQADEAEDRAQGLQRELDGERERREKAEGDVAALNRRIQLVEEELDRAQERLATALQKLEEAEKAADESERGMKVIENRAMKDEEKMEIQEMQLKEAKHIAEEADRKYEEVARKLVILEGELERAEERAEVSELKCGDLEEELKNVTNNLKSLEAASEKYSEKEDKYEEEIKLLSDKLKEAETRAEFAERTVAKLEKTIDDLEEKLAQAKEENVGLHQTLDQTLNELNCI

SEQ ID NO: 222 - DNA, 3328 bp, Homo sapiens
cctttggacgcgcgcctcggttccgaacgcagcggacggcgcctcaggcagcgcggcggacagcccgtcctccggcgcgccgcgagcctcggaggaccctagcgacggtcgtggcgtaagaccggggggacgcggcggtagcggcggccgttgcgattgattgcgctggttgcctgcggcgtccacttccttggccgcccttgctacactggctgattgttgtgcagccggcgccatgtctgtgagcgagatcttcgtggagctgcagggctttttggctgccgagcaggacatccgagaggaaatcagaaaagttgtacagagtttagaacaaacagctcgagagattttaactctactgcaaggggtccatcagggtgctgggtttcaggacattccaaagaggtgtttgaaagctcgagaacattttggtacagtaaaaacacatctaacatctttgaagaccaaatttcctgctgaacagtattacagatttcatgagcactggaggtttgtgttgcagcgcttggtcttcttggcagcatttgttgtgtatttggaaacagaaacactagtgactcgagaagcagttacagaaattcttggcatcgaggctgtctgtcaacagcgtgactgctggagactactcccgacccctccacatctccaccttcatcaatgagctggattccggttttcgccttctcaacctgaaaaatgactccctgaggaagcgctacgacggattgaaatatgacgtgaagaaagtagaggaagtggtctatgatctctccatccggggctttaataaggagacggcagcagcttgtgttgaaaaataggaggctctccttgctcctggccttgctgacctcagcggttgccaggaaggggtgagcacagagtgcctcttacggtagttaggatgctcagttgctaaacactgcgctttattttcttaaccagttgtggtgtgagtatcagaattgaaacacttttttgggggtaaaaaatatagcctttacatggacagaattttttttgttgtttcagtgaatatgcctgtaattcagtgtatttcagttccgtcagaaagtgtaaatgttagtttcttggtaaagtccttttcttgcttaccttgactgttgatgtactgattgagaagttcattgtctcgtttgtgattcttccagatgtgatgcttgatattttctatatgcgagttagccatccacacccaggcatagcctggatacagtataaaaatagataattaaaaagatggttgccaagcaaggaaaacttattttatattttcccttccttattttaagcattgtgagtaaatcagatgttgaattcttttgccaagggaattatagctgcaggttctctctcactgccatcaaactgtaaaagattaaactgcgaagtcaagctcaacagattattttggaaagtttttgtattaagggatttagtaacatcattttgttttccaccaggcagggagtagggcttagtgttttaaaacacctctgctttctgatgttgccttaatattctgctattgcagcaattaaaaattgtcttcatgtacatttggaactaacacgtgatgtgatatattcctaaactatgaaacctttttcctagtagtcagctagatcatttgttctgggagtataaagccacccacgtaagttaataagcaaaatcctgactattatgttgttagagaaaaatgctttgctttgtctggaagaaagataaaatagtgaattataaataagtcaggccgggcgtggtggctcacacctgtaatcccagcacactgggaggccgaggcagggggactgcttgagctcaggagttcgagaccagcctgggcaacaaagtgagactccatctctatataaaaacaaaaaccacgaaagcacacacaaaataaatcagtgggatttggtaatgtgttttagagtaagaaatttcaggttgttggtgactatcccaacagtcatgttttaaatgtacagtttggggcaagtcatgtaaatactgttggtggtcttccccacacgccccaattttcaggtagtactaagagtatgtgccaggaaactcttgctattgaattgagatgattaaaatggtgacttaatccgtagttattttgcacccactgaaaggaaagtgctttccagaataatatgaagtatctaaaagtgtcaccttttcttgcctgatcaacaatttgggcttcctgtttgtacaaggggccatttggcatacctttcacagcttttatcaggccaagttaaaggctgactacattttttcatcatgaggaaagcagttgaaatgaggcatgagttactgtgcattgggattttagaacaattttcttgtgacagctctttttgtgaagttaggttcttaaaagtgcccatgatggtcacttaaaatgtgcagtaatagcactgccaggatcaagcatgaaaggcttttaaattagatcatcccacagacaatacgtttgataatagttttttcttttaacctctttaagtattgattctgcttgagaatattgaagtacttgccagaagttgtggatttcagttttaacaaatgctattaaagtggagaagcacactctggtcttggaattccatttgaggatttagaagtgtcatgtttataactattcagttgtgtttgttgctggcttgttgtaaagcaataaaatttttttggtctttttgtaagtgagtgtgctgctgtaagaaatctcccatgtgcataacaaattctgaatattttttgaggctaaagaagaccggggtgacaagcagatactgctgtgtaatggttacactaaccaaaagacaccagccactcagagttctatactgtaaagcgcagataacatttgtgtgttataccttgattggggaattaaaagtcatttaactgaagatgttgagaaacctgggctctggttttagtataccggaattacttttttccaattttagaaaatcaagcaggttagagaaaatagagatgaattaggggacactgtcttatggattcatttataagaagagaaccagccatatacacttggggagatttgccacatcttaaacttgaataatagtatgagtaatgcttaagggagtttaatagagaaggaaagctttggcagtgttttgagaacttaagtggctaaagagatgagacaaacatgcaggtcgctactggcatagtttcataattgtgtactcggaaattaaagtttgcttgtttcttggtctggattaaa

SEQ ID NO: 223 - protein, 148 aa, Homo sapiens
MSVSEIFVELQGFLAAEQDIREEIRKVVQSLEQTAREILTLLQGVHQGAGFQDIPKRCLKAREHFGTVKTHLTSLKTKFPAEQYYRFHEHWRFVLQRLVFLAAFVVYLETETLVTREAVTEILGIEAVCQQRDCWRLLPTPPHLHLHQ

SEQ ID NO: 224 - DNA, 3408 bp, Homo sapiens
cctttggacgcgcgcctcggttccgaacgcagcggacggcgcctcaggcagcgcggcggacagcccgtcctccggcgcgccgcgagcctcggaggaccctagcgacggtcgtggcgtaagaccggggggacgcggcggtagcggcggccgttgcgattgattgcgctggttgcctgcggcgtccacttccttggccgcccttgctacactggctgattgttgtgcagccggcgccatgtctgtgagcgagatcttcgtggagctgcagggctttttggctgccgagcaggacatccgagaggaaatcagaaaagttgtacagagtttagaacaaacagctcgagagattttaactctactgcaaggggtccatcagggtgctgggtttcaggacattccaaagaggtgtttgaaagctcgagaacattttggtacagtaaaaacacatctaacatctttgaagaccaaatttcctgctgaacagtattacagatttcatgagcactggaggtttgtgttgcagcgcttggtcttcttggcagcatttgttgtgtatttggaaacagaaacactagtgactcgagaagcagttacagaaattcttggcattgagccagatcgggagaaaggatttcatctggatgtagaagattatctctcaggagttctaattcttgccagtgaactgtcgaggctgtctgtcaacagcgtgactgctggagactactcccgacccctccacatctccaccttcatcaatgagctggattccggttttcgccttctcaacctgaaaaatgactccctgaggaagcgctacgacggattgaaatatgacgtgaagaaagtagaggaagtggtctatgatctctccatccggggctttaataaggagacggcagcagcttgtgttgaaaaataggaggctctccttgctcctggccttgctgacctcagcggttgccaggaaggggtgagcacagagtgcctcttacggtagttaggatgctcagttgctaaacactgcgctttattttcttaaccagttgtggtgtgagtatcagaattgaaacacttttttgggggtaaaaaatatagcctttacatggacagaattttttttgttgtttcagtgaatatgcctgtaattcagtgtatttcagttccgtcagaaagtgtaaatgttagtttcttggtaaagtccttttcttgcttaccttgactgttgatgtactgattgagaagttcattgtctcgtttgtgattcttccagatgtgatgcttgatattttctatatgcgagttagccatccacacccaggcatagcctggatacagtataaaaatagataattaaaaagatggttgccaagcaaggaaaacttattttatattttcccttccttattttaagcattgtgagtaaatcagatgttgaattcttttgccaagggaattatagctgcaggttctctctcactgccatcaaactgtaaaagattaaactgcgaagtcaagctcaacagattattttggaaagtttttgtattaagggatttagtaacatcattttgttttccaccaggcagggagtagggcttagtgttttaaaacacctctgctttctgatgttgccttaatattctgctattgcagcaattaaaaattgtcttcatgtacatttggaactaacacgtgatgtgatatattcctaaactatgaaacctttttcctagtagtcagctagatcatttgttctgggagtataaagccacccacgtaagttaataagcaaaatcctgactattatgttgttagagaaaaatgctttgctttgtctggaagaaagataaaatagtgaattataaataagtcaggccgggcgtggtggctcacacctgtaatcccagcacactgggaggccgaggcagggggactgcttgagctcaggagttcgagaccagcctgggcaacaaagtgagactccatctctatataaaaacaaaaaccacgaaagcacacacaaaataaatcagtgggatttggtaatgtgttttagagtaagaaatttcaggttgttggtgactatcccaacagtcatgttttaaatgtacagtttggggcaagtcatgtaaatactgttggtggtcttccccacacgccccaattttcaggtagtactaagagtatgtgccaggaaactcttgctattgaattgagatgattaaaatggtgacttaatccgtagttattttgcacccactgaaaggaaagtgctttccagaataatatgaagtatctaaaagtgtcaccttttcttgcctgatcaacaatttgggcttcctgtttgtacaaggggccatttggcatacctttcacagcttttatcaggccaagttaaaggctgactacattttttcatcatgaggaaagcagttgaaatgaggcatgagttactgtgcattgggattttagaacaattttcttgtgacagctctttttgtgaagttaggttcttaaaagtgcccatgatggtcacttaaaatgtgcagtaatagcactgccaggatcaagcatgaaaggcttttaaattagatcatcccacagacaatacgtttgataatagttttttcttttaacctctttaagtattgattctgcttgagaatattgaagtacttgccagaagttgtggatttcagttttaacaaatgctattaaagtggagaagcacactctggtcttggaattccatttgaggatttagaagtgtcatgtttataactattcagttgtgtttgttgctggcttgttgtaaagcaataaaatttttttggtctttttgtaagtgagtgtgctgctgtaagaaatctcccatgtgcataacaaattctgaatattttttgaggctaaagaagaccggggtgacaagcagatactgctgtgtaatggttacactaaccaaaagacaccagccactcagagttctatactgtaaagcgcagataacatttgtgtgttataccttgattggggaattaaaagtcatttaactgaagatgttgagaaacctgggctctggttttagtataccggaattacttttttccaattttagaaaatcaagcaggttagagaaaatagagatgaattaggggacactgtcttatggattcatttataagaagagaaccagccatatacacttggggagatttgccacatcttaaacttgaataatagtatgagtaatgcttaagggagtttaatagagaaggaaagctttggcagtgttttgagaacttaagtggctaaagagatgagacaaacatgcaggtcgctactggcatagtttcataattgtgtactcggaaattaaagtttgcttgtttcttggtctggattaaa

SEQ ID NO: 225 - protein, 228 aa, Homo sapiens
MSVSEIFVELQGFLAAEQDIREEIRKVVQSLEQTAREILTLLQGVHQGAGFQDIPKRCLKAREHFGTVKTHLTSLKTKFPAEQYYRFHEHWRFVLQRLVFLAAFVVYLETETLVTREAVTEILGIEPDREKGFHLDVEDYLSGVLILASELSRLSVNSVTAGDYSRPLHISTFINELDSGFRLLNLKNDSLRKRYDGLKYDVKKVEEVVYDLSIRGFNKETAAACVEK

SEQ ID NO: 226 - DNA, 1514 bp, Homo sapiens
agttctcactgagacctgtcaccccgactcaacgtgagacgcaccgcccggactcaccatgcgtgaatgcatctcagtccacgtggggcaggcaggtgtccagatgggcaatgcctgctgggagctctattgcttggaacatgggattcagcctgatgggcagatgcccagtgacaagaccattggtggaggggacgactccttcaccaccttcttctgtgaaactggtgctggaaaacacgtaccccgggcagtttttgtggatctggagcctacggtcattgatgagatccgaaatggcccataccgacagctcttccacccagagcagctcatcactgggaaagaggatgctgccaacaactatgcccgtggtcactataccattggcaaggagatcattgacccagtgctggatcggatccgcaagctgtctgaccagtgcacaggacttcagggcttcctggtgttccacagctttggtgggggcactggctctggcttcacctcactcctgatggagcggctctctgttgactatggcaagaaatccaagctggaattctccatctacccagccccccaggtgtctacagccgtggtcgagccctacaactctatcctgaccacccacaccaccctggagcactcagactgtgccttcatggtggacaacgaagcaatctatgacatctgccgccgcaacctagacatcgagcgcccaacctacaccaacctcaatcgcctcattagccaaattgtctcctccatcacagcttctctgcgctttgacggggccctcaatgtggacctgacagagttccagaccaacctggtgccctaccctcgcatccacttccccctggccacctatgcaccagtcatctctgcagaaaaggcataccacgagcagctgtcggtggcagagatcaccaatgcctgctttgagcctgccaaccagatggtaaagtgtgatccccggcacggcaagtacatggcctgctgcctgctgtaccgtggagatgtggtgcccaaggatgtcaacgctgccattgccgccatcaagaccaagcgcagcattcagtttgtggactggtgccccacaggcttcaaggttggtatcaactaccagcctcccactgtggtgcctgggggtgacctggccaaggtgcagcgtgccgtgtgcatgctgagcaacacgaccgccatcgccgaggcctgggcccgcctggaccacaagttcgacctgatgtatgccaagagggcgtttgtgcactggtatgtgggtgagggcatggaggagggtgagttctccgaggcccgtgaggatatggctgccctggagaaggattatgaggaggtgggcatcgactcctatgaggacgaggatgagggagaagaataaagcagctgcctggagcctattcactatgtttattgcaaaatcctttcgaaataaacagtttccttgcacggttaaaaaaaaaaaaaaaaaaaaaaaaaaaaaaaaaaaa

SEQ ID NO: 227 - protein, 448 aa, Homo sapiens
MRECISVHVGQAGVQMGNACWELYCLEHGIQPDGQMPSDKTIGGGDDSFTTFFCETGAGKHVPRAVFVDLEPTVIDEIRNGPYRQLFHPEQLITGKEDAANNYARGHYTIGKEIIDPVLDRIRKLSDQCTGLQGFLVFHSFGGGTGSGFTSLLMERLSVDYGKKSKLEFSIYPAPQVSTAVVEPYNSILTTHTTLEHSDCAFMVDNEAIYDICRRNLDIERPTYTNLNRLISQIVSSITASLRFDGALNVDLTEFQTNLVPYPRIHFPLATYAPVISAEKAYHEQLSVAEITNACFEPANQMVKCDPRHGKYMACCLLYRGDVVPKDVNAAIAAIKTKRSIQFVDWCPTGFKVGINYQPPTVVPGGDLAKVQRAVCMLSNTTAIAEAWARLDHKFDLMYAKRAFVHWYVGEGMEEGEFSEAREDMAALEKDYEEVGIDSYEDEDEGEE

SEQ ID NO: 228 - DNA, 3195 bp, Homo sapiens
aattcaaccgcctcttgcacctcggcaccgagggaggggaaggtggggtcgtcgccctttcgggcagccgggagtccaaatgtcaccccgcggtccctgcccagcgccccaaacttcctgtgccggccggacgcgcggcctgcccgtgggccacgtgcactcaccagagcggccttgctgctgccgcggccaccggggtcggctgggacagactgcgggcacgtccccttccagaggctttaactgaaaaatagaacccaggaaggtgtggacactgccagcggctgcagccgacttggaatgacctgggagacaaatacaacagcatggaagatgccaaagtctatgtggctaaagtggactgcacggcccactccgacgtgtgctccgcccagggggtgcgaggataccccaccttaaagcttttcaagccaggccaagaagctgtgaagtaccagggtcctcgggacttccagacactggaaaactggatgctgcagacactgaacgaggagccagtgacaccagagccggaagtggaaccgcccagtgcccccgagctcaagcaagggctgtatgagctctcagcaagcaactttgagctgcacgttgcacaaggcgaccactttatcaagttcttcgctccgtggtgtggtcactgcaaagccctggctccaacctgggagcagctggctctgggccttgaacattccgaaactgtcaagattggcaaggttgattgtacacagcactatgaactctgctccggaaaccaggttcgtggctatcccactcttctctggttccgagatgggaaaaaggtggatcagtacaagggaaagcgggatttggagtcactgagggagtacgtggagtcgcagctgcagcgcacagagactggagcgacggagaccgtcacgccctcagaggccccggtgctggcagctgagcccgaggctgacaagggcactgtgttggcactcactgaaaataacttcgatgacaccattgcagaaggaataaccttcatcaagttttatgctccatggtgtggtcattgtaagactctggctcctacttgggaggaactctctaaaaaggaattccctggtctggcgggggtcaagatcgccgaagtagactgcactgctgaacggaatatctgcagcaagtattcggtacgaggctaccccacgttattgcttttccgaggagggaagaaagtcagtgagcacagtggaggcagagaccttgactcgttacaccgctttgtcctgagccaagcgaaagacgaactttaggaacacagttggaggtcacctctcctgcccagctcccgcaccctgcgtttaggagttcagtcccacagaggccactgggttcccagtggtggctgttcagaaagcagaacatactaagcgtgaggtatcttctttgtgtgtgtgttttccaagccaacacactctacagattctttattaagttaagtttctctaagtaaatgtgtaactcatggtcactgtgtaaacattttcagtggcgatatatcccctttgaccttctcttgatgaaatttacatggtttcctttgagactaaaatagcgttgagggaaatgaaattgctggactatttgtggctcctgagttgagtgattttggtgaaagaaagcacatccaaagcatagtttacctgcccacgagttctggaaaggtggccttgtggcagtattgacgttcctctgatcttaaggtcacagttgactcaatactgtgttggtccgtagcatggagcagattgaaatgcaaaaacccacacctctggaagataccttcacggccgctgctggagcttctgttgctgtgaatacttctctcagtgtgagaggttagccgtgatgaaagcagcgttacttctgaccgtgcctgagtaagagaatgctgatgccataactttatgtgtcgatacttgtcaaatcagttactgttcaggggatccttctgtttctcacggggtgaaacatgtctttagttcctcatgttaacacgaagccagagcccacatgaactgttggatgtcttccttagaaagggtaggcatggaaaattccacgaggctcattctcagtatctcattaactcattgaaagattccagttgtatttgtcacctggggtgacaagaccagacaggctttcccaggcctgggtatccagggaggctctgcagccctgctgaagggccctaactagagttctagagtttctgattctgtttctcagtagtccttttagaggcttgctatacttggtctgcttcaaggaggtcgaccttctaatgtatgaagaatgggatgcatttgatctcaagaccaaagacagatgtcagtgggctgctctggccctggtgtgcacggctgtggcagctgttgatgccagtgtcctctaactcatgctgtccttgtgattaaacacctctatctcccttgggaataagcacatacaggcttaagctctaagatagataggtgtttgtccttttaccatcgagctacttcccataataaccactttgcatccaacactcttcacccacctcccatacgcaaggggatgtggatacttggcccaaagtaactggtggtaggaatcttagaaacaagaccacttatactgtctgtctgaggcagaagataacagcagcatctcgaccagcctctgccttaaaggaaatctttattaatcacgtatggttcacagataattctttttttaaaaaaacccaacctcctagagaagcacaactgtcaagagtcttgtacacacaacttcagctttgcatcacgagtcttgtattccaagaaaatcaaagtggtacaatttgtttgtttacactatgatactttctaaataaactctttttttttaaaagtctggtctttccttcaatgttacagcaaaacagatataaaatagacaataaattatagtttatatttacaaaaaaagctgtaagtgcaaacagttgtagattataaatgtattatttaatcagtttagtatgaaattgccttcccagtacatgattgtgaaaaagacatttagaaaatattctaaaatttaatctgagcctcactttctacaagggaaatcatgatttccgttcataaacagcatgctcatccccctaacaccatt

SEQ ID NO: 229 - protein, 324 aa, Homo sapiens
MEDAKVYVAKVDCTAHSDVCSAQGVRGYPTLKLFKPGQEAVKYQGPRDFQTLENWMLQTLNEEPVTPEPEVEPPSAPELKQGLYELSASNFELHVAQGDHFIKFFAPWCGHCKALAPTWEQLALGLEHSETVKIGKVDCTQHYELCSGNQVRGYPTLLWFRDGKKVDQYKGKRDLESLREYVESQLQRTETGATETVTPSEAPVLAAEPEADKGTVLALTENNFDDTIAEGITFIKFYAPWCGHCKTLAPTWEELSKKEFPGLAGVKIAEVDCTAERNICSKYSVRGYPTLLLFRGGKKVSEHSGGRDLDSLHRFVLSQAKDEL

SEQ ID NO: 230 - DNA, 3231 bp, Homo sapiens
ccggaggccgcggcgagagcgcgcccagccccgccgcgatgcccgcgcgcccaggacgcctcctcccgctgctggcccggccggcggccctgactgcgctgctgctgctgctgctgggccatggcggcggcgggcgctggggcgcccgggcccaggaggcggcggcggcggcggcggacgggccccccgcggcagacggcgaggacggacaggacccgcacagcaagcacctgtacacggccgacatgttcacgcacgggatccagagcgccgcgcacttcgtcatgttcttcgcgccctggtgtggacactgccagcggctgcagccgacttggaatgacctgggagacaaatacaacagcatggaagatgccaaagtctatgtggctaaagtggactgcacggcccactccgacgtgtgctccgcccagggggtgcgaggataccccaccttaaagcttttcaagccaggccaagaagctgtgaagtaccagggtcctcgggacttccagacactggaaaactggatgctgcagacactgaacgaggagccagtgacaccagagccggaagtggaaccgcccagtgcccccgagctcaagcaagggctgtatgagctctcagcaagcaactttgagctgcacgttgcacaaggcgaccactttatcaagttcttcgctccgtggtgtggtcactgcaaagccctggctccaacctgggagcagctggctctgggccttgaacattccgaaactgtcaagattggcaaggttgattgtacacagcactatgaactctgctccggaaaccaggttcgtggctatcccactcttctctggttccgagatgggaaaaaggtggatcagtacaagggaaagcgggatttggagtcactgagggagtacgtggagtcgcagctgcagcgcacagagactggagcgacggagaccgtcacgccctcagaggccccggtgctggcagctgagcccgaggctgacaagggcactgtgttggcactcactgaaaataacttcgatgacaccattgcagaaggaataaccttcatcaagttttatgctccatggtgtggtcattgtaagactctggctcctacttgggaggaactctctaaaaaggaattccctggtctggcgggggtcaagatcgccgaagtagactgcactgctgaacggaatatctgcagcaagtattcggtacgaggctaccccacgttattgcttttccgaggagggaagaaagtcagtgagcacagtggaggcagagaccttgactcgttacaccgctttgtcctgagccaagcgaaagacgaactttaggaacacagttggaggtcacctctcctgcccagctcccgcaccctgcgtttaggagttcagtcccacagaggccactgggttcccagtggtggctgttcagaaagcagaacatactaagcgtgaggtatcttctttgtgtgtgtgttttccaagccaacacactctacagattctttattaagttaagtttctctaagtaaatgtgtaactcatggtcactgtgtaaacattttcagtggcgatatatcccctttgaccttctcttgatgaaatttacatggtttcctttgagactaaaatagcgttgagggaaatgaaattgctggactatttgtggctcctgagttgagtgattttggtgaaagaaagcacatccaaagcatagtttacctgcccacgagttctggaaaggtggccttgtggcagtattgacgttcctctgatcttaaggtcacagttgactcaatactgtgttggtccgtagcatggagcagattgaaatgcaaaaacccacacctctggaagataccttcacggccgctgctggagcttctgttgctgtgaatacttctctcagtgtgagaggttagccgtgatgaaagcagcgttacttctgaccgtgcctgagtaagagaatgctgatgccataactttatgtgtcgatacttgtcaaatcagttactgttcaggggatccttctgtttctcacggggtgaaacatgtctttagttcctcatgttaacacgaagccagagcccacatgaactgttggatgtcttccttagaaagggtaggcatggaaaattccacgaggctcattctcagtatctcattaactcattgaaagattccagttgtatttgtcacctggggtgacaagaccagacaggctttcccaggcctgggtatccagggaggctctgcagccctgctgaagggccctaactagagttctagagtttctgattctgtttctcagtagtccttttagaggcttgctatacttggtctgcttcaaggaggtcgaccttctaatgtatgaagaatgggatgcatttgatctcaagaccaaagacagatgtcagtgggctgctctggccctggtgtgcacggctgtggcagctgttgatgccagtgtcctctaactcatgctgtccttgtgattaaacacctctatctcccttgggaataagcacatacaggcttaagctctaagatagataggtgtttgtccttttaccatcgagctacttcccataataaccactttgcatccaacactcttcacccacctcccatacgcaaggggatgtggatacttggcccaaagtaactggtggtaggaatcttagaaacaagaccacttatactgtctgtctgaggcagaagataacagcagcatctcgaccagcctctgccttaaaggaaatctttattaatcacgtatggttcacagataattctttttttaaaaaaacccaacctcctagagaagcacaactgtcaagagtcttgtacacacaacttcagctttgcatcacgagtcttgtattccaagaaaatcaaagtggtacaatttgtttgtttacactatgatactttctaaataaactctttttttttaaaagtctggtctttccttcaatgttacagcaaaacagatataaaatagacaataaattatagtttatatttacaaaaaaagctgtaagtgcaaacagttgtagattataaatgtattatttaatcagtttagtatgaaattgccttcccagtacatgattgtgaaaaagacatttagaaaatattctaaaatttaatctgagcctcactttctacaagggaaatcatgatttccgttcataaacagcatgctcatccccctaacaccatt

SEQ ID NO: 231 - protein, 432 aa, Homo sapiens
MPARPGRLLPLLARPAALTALLLLLLGHGGGGRWGARAQEAAAAAADGPPAADGEDGQDPHSKHLYTADMFTHGIQSAAHFVMFFAPWCGHCQRLQPTWNDLGDKYNSMEDAKVYVAKVDCTAHSDVCSAQGVRGYPTLKLFKPGQEAVKYQGPRDFQTLENWMLQTLNEEPVTPEPEVEPPSAPELKQGLYELSASNFELHVAQGDHFIKFFAPWCGHCKALAPTWEQLALGLEHSETVKIGKVDCTQHYELCSGNQVRGYPTLLWFRDGKKVDQYKGKRDLESLREYVESQLQRTETGATETVTPSEAPVLAAEPEADKGTVLALTENNFDDTIAEGITFIKFYAPWCGHCKTLAPTWEELSKKEFPGLAGVKIAEVDCTAERNICSKYSVRGYPTLLLFRGGKKVSEHSGGRDLDSLHRFVLSQAKDEL

SEQ ID NO: 232 - DNA, 1329 bp, Homo sapiens
tggctgctgggtgccgcacgccttcccatcctcctcctctcccctcccccatccctccccgccccctcggccgctccgctccctggcgtgactcggcactgagagtcccgggagaagactcggcggtcgccacctcttctgtccaggcctcggccttcctgagcatctctccttcctctcccagatcgtcttctccttcagtttcaaagccagtggcgtcgcggccaccctgccgggctctctgtgaggatggtgggggtgaagcccgtcgggagcgacccggatttccagccagagctgagcggcgcgggctccagactcgccgtggtcaagttcaccatgagagggtgtgggccatgtttgaggattgccccagcattcagttctatgagtaataaatatccacaggctgttttcttggaagtcgatgtacatcagtgtcagggaacagctgccaccaacaatatatcagcaacacctacatttttgttttttcgaaacaaagtgagaattgatcaatatcaaggagcagatgctgtgggattagaagaaaaaatcaagcagcacttagaaaatgaccctggaagcaatgaggacacagatattccaaaaggctatatggatttaatgccttttattaacaaagctggttgtgaatgtcttaatgaaagtgatgagcatggatttgacaactgtttacgaaaagacacaaccttcttggaatctgactgtgatgaacagctgcttattactgtggcattcaatcaacctgttaagctttattccatgaaatttcaagggccagataatggtcagggccctaaatatgtaaaaatttttatcaacctaccccgatctatggattttgaagaggcagaaagaagtgaaccaactcaagctctggaactgacagaggatgatattaaagaagatggcattgttccacttcgttatgttaagtttcagaatgttaacagtgtaactatatttgttcagtcgaatcaaggtgaagaggaaacaacaagaatttcatattttacttttattggtactccagtccaggcaacaaatatgaatgacttcaaacgagtagttggcaaaaaaggagaaagccactaaggtacaaaagacactggacaaccatattgcaatcagatctacagctcctggataattgcttgattctcgccagagactgtcaatgtttcattcattgccattaccaataaatcattgcttttgttcagatggtatcactagtgtttccattgtaatcttgacacatgcaattgtaaataaaagtcaccacttttgccaagcttaaaaaaa

SEQ ID NO: 233 - protein, 289 aa, Homo sapiens
MVGVKPVGSDPDFQPELSGAGSRLAVVKFTMRGCGPCLRIAPAFSSMSNKYPQAVFLEVDVHQCQGTAATNNISATPTFLFFRNKVRIDQYQGADAVGLEEKIKQHLENDPGSNEDTDIPKGYMDLMPFINKAGCECLNESDEHGFDNCLRKDTTFLESDCDEQLLITVAFNQPVKLYSMKFQGPDNGQGPKYVKIFINLPRSMDFEEAERSEPTQALELTEDDIKEDGIVPLRYVKFQNVNSVTIFVQSNQGEEETTRISYFTFIGTPVQATNMNDFKRVVGKKGESH

SEQ ID NO: 234 - DNA, 2151 bp, Homo sapiens
gcctctccaaaggctgcagaagtttcttgctaacaaaaagtccgcacattcgagcaaagacaggctttagcgagttattaaaaacttaggggcgctcttgtcccccacagggcccgaccgcacacagcaaggcgatggcccagctgtaagttggtagcactgagaactagcagcgcgcgcggagcccgctgagacttgaatcaatctggtctaacggtttcccctaaaccgctaggagccctcaatcggcgggacagcagggcgcgtcctctgccactctcgctccgaggtccccgcgccagagacgcagccgcgctcccaccacccacacccaccgcgccctcgttcgcctcttctccgggagccagtccgcgccaccgccgccgcccaggccatcgccaccctccgcagccatgtccaccaggtccgtgtcctcgtcctcctaccgcaggatgttcggcggcccgggcaccgcgagccggccgagctccagccggagctacgtgactacgtccacccgcacctacagcctgggcagcgcgctgcgccccagcaccagccgcagcctctacgcctcgtccccgggcggcgtgtatgccacgcgctcctctgccgtgcgcctgcggagcagcgtgcccggggtgcggctcctgcaggactcggtggacttctcgctggccgacgccatcaacaccgagttcaagaacacccgcaccaacgagaaggtggagctgcaggagctgaatgaccgcttcgccaactacatcgacaaggtgcgcttcctggagcagcagaataagatcctgctggccgagctcgagcagctcaagggccaaggcaagtcgcgcctgggggacctctacgaggaggagatgcgggagctgcgccggcaggtggaccagctaaccaacgacaaagcccgcgtcgaggtggagcgcgacaacctggccgaggacatcatgcgcctccgggagaaattgcaggaggagatgcttcagagagaggaagccgaaaacaccctgcaatctttcagacaggatgttgacaatgcgtctctggcacgtcttgaccttgaacgcaaagtggaatctttgcaagaagagattgcctttttgaagaaactccacgaagaggaaatccaggagctgcaggctcagattcaggaacagcatgtccaaatcgatgtggatgtttccaagcctgacctcacggctgccctgcgtgacgtacgtcagcaatatgaaagtgtggctgccaagaacctgcaggaggcagaagaatggtacaaatccaagtttgctgacctctctgaggctgccaaccggaacaatgacgccctgcgccaggcaaagcaggagtccactgagtaccggagacaggtgcagtccctcacctgtgaagtggatgcccttaaaggaaccaatgagtccctggaacgccagatgcgtgaaatggaagagaactttgccgttgaagctgctaactaccaagacactattggccgcctgcaggatgagattcagaatatgaaggaggaaatggctcgtcaccttcgtgaataccaagacctgctcaatgttaagatggcccttgacattgagattgccacctacaggaagctgctggaaggcgaggagagcaggatttctctgcctcttccaaacttttcctccctgaacctgagggaaactaatctggattcactccctctggttgatacccactcaaaaaggacacttctgattaagacggttgaaactagagatggacaggttatcaacgaaacttctcagcatcacgatgaccttgaataaaaattgcacacactcagtgcagcaatatattaccagcaagaataaaaaagaaatccatatcttaaagaaacagctttcaagtgcctttctgcagtttttcaggagcgcaagatagatttggaataggaataagctctagttcttaacaaccgacactcctacaagatttagaaaaaagtttacaacataatctagtttacagaaaaatcttgtgctagaatactttttaaaaggtattttgaataccattaaaactgcttttttttttccagcaagtatccaaccaacttggttctgcttcaataaatctttggaaaaactcaaaaaaaaaaaaaaa

SEQ ID NO: 235 - protein, 466 aa, Homo sapiens
MSTRSVSSSSYRRMFGGPGTASRPSSSRSYVTTSTRTYSLGSALRPSTSRSLYASSPGGVYATRSSAVRLRSSVPGVRLLQDSVDFSLADAINTEFKNTRTNEKVELQELNDRFANYIDKVRFLEQQNKILLAELEQLKGQGKSRLGDLYEEEMRELRRQVDQLTNDKARVEVERDNLAEDIMRLREKLQEEMLQREEAENTLQSFRQDVDNASLARLDLERKVESLQEEIAFLKKLHEEEIQELQAQIQEQHVQIDVDVSKPDLTAALRDVRQQYESVAAKNLQEAEEWYKSKFADLSEAANRNNDALRQAKQESTEYRRQVQSLTCEVDALKGTNESLERQMREMEENFAVEAANYQDTIGRLQDEIQNMKEEMARHLREYQDLLNVKMALDIEIATYRKLLEGEESRISLPLPNFSSLNLRETNLDSLPLVDTHSKRTLLIKTVETRDGQVINETSQHHDDLE

SEQ ID NO: 236 - DNA, 3779 bp, Homo sapiens
agggggttgtccgtcagtggcacgcacagcagccgcagccgcctcgcgcccggtcccgcggtcgcagctccagccgcctcctccgcgcagccgccgcctcagctgctcgctctgtgggtcggtcctctccggcacttgggctccagtcgcgccctccaagcccttcaggccgccccagtgtcctcctccttctccggccagacccagccccgcgaagatggtggaccgcgagcaactggtgcagaaagcccggctggccgagcaggcggagcgctacgacgacatggccgcggccatgaagaacgtgacagagctgaatgagccactgtcgaatgaggaacgaaaccttctgtctgtggcctacaagaacgttgtgggggcacgccgctcttcctggagggtcatcagtagcattgagcagaagacatctgcagacggcaatgagaagaagattgagatggtccgtgcgtaccgggagaagatagagaaggagttggaggctgtgtgccaggatgtgctgagcctgctggataactacctgatcaagaattgcagcgagacccagtacgagagcaaagtgttctacctgaagatgaaaggggactactaccgctacctggctgaagtggccaccggagagaaaagggcgacggtggtggagtcctccgagaaggcctacagcgaagcccacgagatcagcaaagagcacatgcagcccacccaccccatccgattaggcctggctcttaactactccgtcttctactatgagatccagaacgccccagagcaagcgtgccacttggccaagaccgcgttcgacgacgccatcgccgagcttgacaccctcaacgaggactcctacaaggactccacgctcatcatgcagctcctccgcgacaacctcacgctctggacgagcgaccagcaggacgacgatggcggcgaaggcaacaattaaggccccaggggaactggcagcgcacgcggatgctactactgcagtctttatttttttcccatgagttgggggtcgggtgggggagggaaagggagggatgaccttcccagggagaaacccacgacctgtcctgtctttgatcgcctctttgacatttttgccaaaataccactagtggaaagtcaggctagctgtgctggtattggaatagcagcctcacactggcgtctggactgttctgtagattcatgcaagtggagctgtctgtctctaatttaacttattgctagataatagggttttcagatgaaaagaaaacttaaagaggaatggccctcattcagtaagttctgtggttccagtaaggatttttatgtacatacgctctcgtctctcgttttgggtactttctatctcatctgtctcggctctgcatgttttccagggtgtagcctacagacatggaacagtgtaaatcccagactgacagacttagaacctgaggtctcattcatccttatggtttaggccttgccagttttccgaagtctctgattagttgacagtattaacactaaattgcagtttacagtatttctacattacagccatatgtaacatcaagccatcgattgtgtacttttcctttgctagttgtttgggctttaacatccttattcagccttatccaggttggttttgctgttgatcggtctcctaggctaaatgagaatgaaagcgacttcaggtcaggtggctgtgggattttttttttttggtccttctttcctcttaacgtaaatccaccaccaaaattattaatcctcttgagagaaacgtgaaacgccacaaaaatagagaaaattcaggtctgtatgtcatggatcgtgttggtattttcagagaacatcccgcttctgaagctgctgcagctccctcctcagggatcacactgccgtcacccactctgcactggggcgtttcctactgcgcctcgtgctggcggacgcagctgggtgcagaagctgtggggtcggagaggcgtttggagaaggtctgtggtgcagtgtgtgaaaattcaggtgctagaagcctactggtagaaaaacccaaaaggaagagctatatccttaaccattctgtccaatttcgggagccttgtcagtgtgtcagtttttcctccccgaagacactccttccccaagtaattgtaggaagataaaaaaactgttaccagataacaaacactgaactcctatttgaccagaactttttcctctcgagatagttttttctttttaatgaaaaaagcataggaattggagattggcttgtctcacgcagccagtgcacatttggaattgacggaaacaacgttgctatttccacccatttgttttcggcagccttaaggccctcattctcatttcgggtgaatctgtctatctgtgaacgtggcccgcatgtgcattcttttttttatatatataaagtcagtgacgaggaactcccgagacgtgtaatgacaccacacttgttttctttgtttctttgttttatttaggcaagaagaggtgtgagtaattgaggaaaaactgacagatgcttttgctaataccaaaattgagcttacaattaggaactgagtatgtgtaacaggatacaggtgacagtgaagatagaagaaccacgatgaccacagactcaatgtgctctgtaacatcgcacagtttacccagcatgactttccttaggaggccccctcctcacgctagagtaaaagtcccagttaagtgaagcctaccagaagaactagtagaagaagctttgccgcttttgtgcctctcacaggcgcctaaagtcattgccatgggaggaagacgatttggggggggaggggggggggggcagggtaggtggggctttccctaatttatcttcatgtccagtgagcagtgttgcgtttttccttgtagcatttggaaatgatttactggaattacaaaacctatttttcctttaaatttcagctttggctctggctgctttttagaataatgcaagataaaaatcacacctgagggctgaaaacggagagggaatgggagacttgatatttaagcagcttgaatggtttttcttttctttatttttaaagaaatgcacttgcctatgatactgtctctccagtgaaatgattactcctccattactctattgatacaatattgtgcatgctagtgttgtatttctatacagtagcttgaaattgattaacttatactgtaggtgttatgtattcctatgacaaaaaaaattaagtcttcaaattttttaaaggttttttttttttaatttaatttttccttttgggggtaaagtttgctctaccaaatagtgattgtaacaaattgatctgttttggatgttgctatagtgacatgcagttatatattttgtttttaaaagggggggagcaaaagaaacaccagtgttagcttaatcttaatgtctggtgtttgtcatggtgaaattataactattacagtgttggagaacaacaaatatgttctctgaatgagcctttgtgctttttgtcatgttatgcagtgaactatttttaaggtctaatcagtgattatttttccagctccgtgtttctctaaggaattatttcacacacggaccatctttagcagtttcctcagtgatggaatatcatgaatgtgagtcattatgtagctgtcgtacattgagcaaataaacttacagatctgacgccagtgaaaaaaaaaaaaaaaaaaaaaaaaaaaaaaaa

SEQ ID NO: 237 - protein, 247 aa, Homo sapiens
MVDREQLVQKARLAEQAERYDDMAAAMKNVTELNEPLSNEERNLLSVAYKNVVGARRSSWRVISSIEQKTSADGNEKKIEMVRAYREKIEKELEAVCQDVLSLLDNYLIKNCSETQYESKVFYLKMKGDYYRYLAEVATGEKRATVVESSEKAYSEAHEISKEHMQPTHPIRLGLALNYSVFYYEIQNAPEQACHLAKTAFDDAIAELDTLNEDSYKDSTLIMQLLRDNLTLWTSDQQDDDGGEGNN

SEQ ID NO: 238 - DNA, 2240 bp, Homo sapiens
cggagcggggaacgaggccgtcggccattttgtgtctgcttcctgtgggacgtggtggtagccgttgggttgggaaagtgagggatttttggcctcgtttctcctgcttcttttctcctcccttttactttgccggtagaacacagttatgggtcgcaagaagaagaagcagctgaagccgtggtgctggtattgtaatagagattttgatgatgagaagatccttattcagcaccaaaaagcaaagcattttaaatgccatatatgtcacaagaaattgtatacaggacctggcttagctattcattgcatgcaggtacataaagaaacaatagatgccgtaccaaatgcaatacctggaagaacagacatagagttggaaatatatggtatggaaggtattccagaaaaagacatggatgaaagacgacgacttcttgaacagaaaacacaagaaagtcaaaaaaagaagcaacaagatgattctgatgaatatgatgatgacgactctgcagcctcaacttcatttcagccacagcctgttcaacctcagcaaggttatattcctccaatggcacagccaggactgccaccagtaccaggagcaccaggaatgcctccaggcatacctccattaatgccaggtgttcctcctctgatgccaggaatgccaccagttatgccaggcatgccacctggattgcatcatcagagaaaatacacccagtcattttgcggtgaaaacataatgatgccaatgggtggaatgatgccacctggaccaggaataccacctctgatgcctggaatgccaccaggtatgcccccacctgttccacgtcctggaattcctccaatgactcaagcacaggctgtttcagcgccaggtattcttaatagaccacctgcaccaacagcaactgtacctgccccacagcctccagttactaagcctcttttccccagtgctggacaggctcaggcagctgtccaaggacctgttggtacagatttcaaacccttaaatagtacccctgcaacaactacagaacccccaaagcctacattccctgcttatacacagtctacagcttcaacaactagtacaacaaatagtactgcagctaaaccagcggcttcaataacaagtaagcctgctacacttacaacaactagtgcaaccagtaagttgatccatccagatgaggatatatccctggaagagagaagggcacagttacctaagtatcaacgtaatcttcctcggccaggacaggcccccatcggtaatccaccagttggaccaattggaggtatgatgccaccacagccaggcatcccacagcaacaaggaatgagacccccaatgccacctcatggtcagtatggtggtcatcatcaaggcatgccaggataccttcctggtgctatgcccccgtatgggcagggaccgccaatggtgcccccttaccagggtgggcctcctcgacctccgatgggaatgagacctcctgtaatgtcgcaaggtggccgttactgatcttacttcatccagtctaataggtttggagattaaaccttttctcaacttgtgctgtttatatagccaagcttccgtcaataaggcttcattgtgactttaacaaacattatcttcccacataccaggaactattggacatttattttacatgggaaaaattatttggaataataaagcaggaacttttcctgaagttgcaatttatactgtatggcttctttttcatgtttcatctaggtttttagaagtgaagtatagtaaatttggttcgttaaattgtgaaggcgctggaattacatgaacataccaccctagtaaaggcaagttctgtaagcttacattgctatttgtaaagtttgccttcacagcatttcagatgctgttggacttcatgtccccaacctagcttggtgagggctgtaactgtttccaagtacttgtacattggaagtctgaatgtgtaacaatatttaatgtatttagagttcctcatgttgcagggtttaagaaatctgacccaccaaggtcatgtgacttttctgtactgttaaacttcattgtaataaaatgagagaaaaatttatgcctttttattcataacccagctgtggaccactgcctgaaaggtttgtacagatgcatgccacagtagatgtccacataataaaattcatagttaccaatgcaaaaaaaaaaa

SEQ ID NO: 239 - protein, 463 aa, Homo sapiens
MGRKKKKQLKPWCWYCNRDFDDEKILIQHQKAKHFKCHICHKKLYTGPGLAIHCMQVHKETIDAVPNAIPGRTDIELEIYGMEGIPEKDMDERRRLLEQKTQESQKKKQQDDSDEYDDDDSAASTSFQPQPVQPQQGYIPPMAQPGLPPVPGAPGMPPGIPPLMPGVPPLMPGMPPVMPGMPPGLHHQRKYTQSFCGENIMMPMGGMMPPGPGIPPLMPGMPPGMPPPVPRPGIPPMTQAQAVSAPGILNRPPAPTATVPAPQPPVTKPLFPSAGQAQAAVQGPVGTDFKPLNSTPATTTEPPKPTFPAYTQSTASTTSTTNSTAAKPAASITSKPATLTTTSATSKLIHPDEDISLEERRAQLPKYQRNLPRPGQAPIGNPPVGPIGGMMPPQPGIPQQQGMRPPMPPHGQYGGHHQGMPGYLPGAMPPYGQGPPMVPPYQGGPPRPPMGMRPPVMSQGGRY

SEQ ID NO: 240 - DNA, 2333 bp, Homo sapiens
cggagcggggaacgaggccgtcggccattttgtgtctgcttcctgtgggacgtggtggtagccgttgggttgggaaagtgagggatttttggcctcgtttctcctgcttcttttctcctcccttttactttgccggtagaacacagttatgggtcgcaagaagaagaagcagctgaagccgtggtgctggtattgtaatagagattttgatgatgagaagatccttattcagcaccaaaaagcaaagcattttaaatgccatatatgtcacaagaaattgtatacaggacctggcttagctattcattgcatgcaggtacataaagaaacaatagatgccgtaccaaatgcaatacctggaagaacagacatagagttggaaatatatggtatggaaggtattccagaaaaagacatggatgaaagacgacgacttcttgaacagaaaacacaagaaagtcaaaaaaagaagcaacaagatgattctgatgaatatgatgatgacgactctgcagcctcaacttcatttcagccacagcctgttcaacctcagcaaggttatattcctccaatggcacagccaggactgccaccagtaccaggagcaccaggaatgcctccaggcatacctccattaatgccaggtgttcctcctctgatgccaggaatgccaccagttatgccaggcatgccacctggattgcatcatcagagaaaatacacccagtcattttgcggtgaaaacataatgatgccaatgggtggaatgatgccacctggaccaggaataccacctctgatgcctggaatgccaccaggtatgcccccacctgttccacgtcctggaattcctccaatgactcaagcacaggctgtttcagcgccaggtattcttaatagaccacctgcaccaacagcaactgtacctgccccacagcctccagttactaagcctcttttccccagtgctggacagatggggacacctgtcacaagctcaagtacagcttcatccaattcagaaagtctgtctgcatcttctaaagctctgtttcctagcacagcacaagctcaggcagctgtccaaggacctgttggtacagatttcaaacccttaaatagtacccctgcaacaactacagaacccccaaagcctacattccctgcttatacacagtctacagcttcaacaactagtacaacaaatagtactgcagctaaaccagcggcttcaataacaagtaagcctgctacacttacaacaactagtgcaaccagtaagttgatccatccagatgaggatatatccctggaagagagaagggcacagttacctaagtatcaacgtaatcttcctcggccaggacaggcccccatcggtaatccaccagttggaccaattggaggtatgatgccaccacagccaggcatcccacagcaacaaggaatgagacccccaatgccacctcatggtcagtatggtggtcatcatcaaggcatgccaggataccttcctggtgctatgcccccgtatgggcagggaccgccaatggtgcccccttaccagggtgggcctcctcgacctccgatgggaatgagacctcctgtaatgtcgcaaggtggccgttactgatcttacttcatccagtctaataggtttggagattaaaccttttctcaacttgtgctgtttatatagccaagcttccgtcaataaggcttcattgtgactttaacaaacattatcttcccacataccaggaactattggacatttattttacatgggaaaaattatttggaataataaagcaggaacttttcctgaagttgcaatttatactgtatggcttctttttcatgtttcatctaggtttttagaagtgaagtatagtaaatttggttcgttaaattgtgaaggcgctggaattacatgaacataccaccctagtaaaggcaagttctgtaagcttacattgctatttgtaaagtttgccttcacagcatttcagatgctgttggacttcatgtccccaacctagcttggtgagggctgtaactgtttccaagtacttgtacattggaagtctgaatgtgtaacaatatttaatgtatttagagttcctcatgttgcagggtttaagaaatctgacccaccaaggtcatgtgacttttctgtactgttaaacttcattgtaataaaatgagagaaaaatttatgcctttttattcataacccagctgtggaccactgcctgaaaggtttgtacagatgcatgccacagtagatgtccacataataaaattcatagttaccaatgcaaaaaaaaaaa

SEQ ID NO: 241 - protein, 494 aa, Homo sapiens
MGRKKKKQLKPWCWYCNRDFDDEKILIQHQKAKHFKCHICHKKLYTGPGLAIHCMQVHKETIDAVPNAIPGRTDIELEIYGMEGIPEKDMDERRRLLEQKTQESQKKKQQDDSDEYDDDDSAASTSFQPQPVQPQQGYIPPMAQPGLPPVPGAPGMPPGIPPLMPGVPPLMPGMPPVMPGMPPGLHHQRKYTQSFCGENIMMPMGGMMPPGPGIPPLMPGMPPGMPPPVPRPGIPPMTQAQAVSAPGILNRPPAPTATVPAPQPPVTKPLFPSAGQMGTPVTSSSTASSNSESLSASSKALFPSTAQAQAAVQGPVGTDFKPLNSTPATTTEPPKPTFPAYTQSTASTTSTTNSTAAKPAASITSKPATLTTTSATSKLIHPDEDISLEERRAQLPKYQRNLPRPGQAPIGNPPVGPIGGMMPPQPGIPQQQGMRPPMPPHGQYGGHHQGMPGYLPGAMPPYGQGPPMVPPYQGGPPRPPMGMRPPVMSQGGRY

SEQ ID NO: 242 - DNA, 2285 bp, Homo sapiens
cggagcggggaacgaggccgtcggccattttgtgtctgcttcctgtgggacgtggtggtagccgttgggttgggaaagtgagggatttttggcctcgtttctcctgcttcttttctcctcccttttactttgccggtagaacacagttatgggtcgcaagaagaagaagcagctgaagccgtggtgctggtattgtaatagagattttgatgatgagaagatccttattcagcaccaaaaagcaaagcattttaaatgccatatatgtcacaagaaattgtatacaggacctggcttagctattcattgcatgcaggtacataaagaaacaatagatgccgtaccaaatgcaatacctggaagaacagacatagagttggaaatatatggtatggaaggtattccagaaaaagacatggatgaaagacgacgacttcttgaacagaaaacacaagaaagtcaaaaaaagaagcaacaagatgattctgatgaatatgatgatgacgactctgcagcctcaacttcatttcagccacagcctgttcaacctcagcaaggttatattcctccaatggcacagccaggactgccaccagtaccaggagcaccaggaatgcctccaggcatacctccattaatgccaggtgttcctcctctgatgccaggaatgccaccagttatgccaggcatgccacctggaatgatgccaatgggtggaatgatgccacctggaccaggaataccacctctgatgcctggaatgccaccaggtatgcccccacctgttccacgtcctggaattcctccaatgactcaagcacaggctgtttcagcgccaggtattcttaatagaccacctgcaccaacagcaactgtacctgccccacagcctccagttactaagcctcttttccccagtgctggacagatggggacacctgtcacaagctcaagtacagcttcatccaattcagaaagtctgtctgcatcttctaaagctctgtttcctagcacagcacaagctcaggcagctgtccaaggacctgttggtacagatttcaaacccttaaatagtacccctgcaacaactacagaacccccaaagcctacattccctgcttatacacagtctacagcttcaacaactagtacaacaaatagtactgcagctaaaccagcggcttcaataacaagtaagcctgctacacttacaacaactagtgcaaccagtaagttgatccatccagatgaggatatatccctggaagagagaagggcacagttacctaagtatcaacgtaatcttcctcggccaggacaggcccccatcggtaatccaccagttggaccaattggaggtatgatgccaccacagccaggcatcccacagcaacaaggaatgagacccccaatgccacctcatggtcagtatggtggtcatcatcaaggcatgccaggataccttcctggtgctatgcccccgtatgggcagggaccgccaatggtgcccccttaccagggtgggcctcctcgacctccgatgggaatgagacctcctgtaatgtcgcaaggtggccgttactgatcttacttcatccagtctaataggtttggagattaaaccttttctcaacttgtgctgtttatatagccaagcttccgtcaataaggcttcattgtgactttaacaaacattatcttcccacataccaggaactattggacatttattttacatgggaaaaattatttggaataataaagcaggaacttttcctgaagttgcaatttatactgtatggcttctttttcatgtttcatctaggtttttagaagtgaagtatagtaaatttggttcgttaaattgtgaaggcgctggaattacatgaacataccaccctagtaaaggcaagttctgtaagcttacattgctatttgtaaagtttgccttcacagcatttcagatgctgttggacttcatgtccccaacctagcttggtgagggctgtaactgtttccaagtacttgtacattggaagtctgaatgtgtaacaatatttaatgtatttagagttcctcatgttgcagggtttaagaaatctgacccaccaaggtcatgtgacttttctgtactgttaaacttcattgtaataaaatgagagaaaaatttatgcctttttattcataacccagctgtggaccactgcctgaaaggtttgtacagatgcatgccacagtagatgtccacataataaaattcatagttaccaatgcaaaaaaaaaaa

SEQ ID NO: 243 - protein, 478 aa, Homo sapiens
MGRKKKKQLKPWCWYCNRDFDDEKILIQHQKAKHFKCHICHKKLYTGPGLAIHCMQVHKETIDAVPNAIPGRTDIELEIYGMEGIPEKDMDERRRLLEQKTQESQKKKQQDDSDEYDDDDSAASTSFQPQPVQPQQGYIPPMAQPGLPPVPGAPGMPPGIPPLMPGVPPLMPGMPPVMPGMPPGMMPMGGMMPPGPGIPPLMPGMPPGMPPPVPRPGIPPMTQAQAVSAPGILNRPPAPTATVPAPQPPVTKPLFPSAGQMGTPVTSSSTASSNSESLSASSKALFPSTAQAQAAVQGPVGTDFKPLNSTPATTTEPPKPTFPAYTQSTASTTSTTNSTAAKPAASITSKPATLTTTSATSKLIHPDEDISLEERRAQLPKYQRNLPRPGQAPIGNPPVGPIGGMMPPQPGIPQQQGMRPPMPPHGQYGGHHQGMPGYLPGAMPPYGQGPPMVPPYQGGPPRPPMGMRPPVMSQGGRY

SEQ ID NO: 244 - protein, 4 aa, Homo sapiens
DEAD

SEQ ID NO: 245 - protein, 4 aa, Homo sapiens
  MOD_RES (4)..(4): Asp or His
DEAX

SEQ ID NO: 246 - protein, 4 aa, Homo sapiens
DECD

1. A method of assessing whether a subject is afflicted with a pervasive developmental disorder, the method comprising:
(1) determining a level of expression of one or more of the markers listed in Tables 2-6 in a biological sample obtained from the subject, using reagents that transform the markers such that the markers can be detected;
(2) comparing the level of expression of the one or more markers in the biological sample obtained from the subject with the level of expression of the one or more markers in a control sample; and
(3) assessing whether the subject is afflicted with a pervasive developmental disorder, wherein a modulation in the level of expression of the one or more markers in the biological sample obtained from the subject relative to the level of expression of the one or more markers in the control sample is an indication that the subject is afflicted with a pervasive developmental disorder.

2. A method of prognosing whether a subject is predisposed to developing a pervasive developmental disorder, the method comprising:
(1) determining a level of expression of one or more of the markers listed in Tables 2-6 present in a biological sample obtained from the subject, using reagents that transform the markers such that the markers can be detected;
(2) comparing the level of expression of the one or more markers present in the biological sample obtained from the subject with the level of expression of the one or more markers present in a control sample; and
(3) prognosing whether the subject is predisposed to developing a pervasive developmental disorder, wherein a modulation in the level of expression of the one or more proteins in the biological sample obtained from the subject relative to the level of expression of the one or more proteins in the control sample is an indication that the subject is predisposed to developing a pervasive developmental disorder.

3. A method of prognosing the severity of a pervasive developmental disorder in a subject, the method comprising
(1) determining a level of expression of one or more of the markers listed in Tables 2-6 in a biological sample obtained from the subject, using reagents that transform the markers such that the markers can be detected;
(2) comparing the level of expression of the one or more markers in the biological sample obtained from the subject with the level of expression of the one or more markers in a control sample; and
(3) assessing the severity of the pervasive developmental disorder, wherein a modulation in the level of expression of the one or more markers in the biological sample obtained from the subject relative to the level of expression of the one or more markers in the control sample is an indication of the severity of the pervasive developmental disorder in the subject.

4. A method for monitoring the progression of a pervasive developmental disorder or symptoms of a pervasive developmental disorder in a subject, the method comprising:
(1) determining a level of expression of one or more of the markers listed in Tables 2-6 present in a first biological sample obtained from the subject at a first time, using reagents that transform the markers such that the markers can be detected;
(2) determining a level of expression of the one or more of the markers listed in Tables 2-6 present in a second biological sample obtained from the subject at a second, later time, using reagents that transform the markers such that the markers can be detected; and
(3) comparing the level of expression of the one or more markers listed in Tables 2-6 present in the first sample obtained from the subject at the first time with the level of expression of the one or more markers present in the second sample obtained from the subject at the second, later time; and
(4) monitoring the progression of the pervasive developmental disorder, wherein a modulation in the level of expression of the one or more markers in the second sample as compared to the first sample is an indication of the progression of the pervasive developmental disorder or symptoms of the pervasive developmental disorder in the subject.

5. The method of claim 1, further comprising selecting a treatment regimen for the subject identified as being afflicted with a pervasive developmental disorder.

6. The method of claim 1, further comprising administering a treatment regimen to the subject identified as being afflicted with a pervasive developmental disorder.

7. The method of claim 4, further comprising continuing administration of an ongoing treatment regimen to the subject for whom the progression of the pervasive developmental disorder is determined to be reduced, delayed or lessened.

8. A method for assessing the efficacy of a treatment regimen for treating a pervasive developmental disorder or symptoms of a pervasive developmental disorder in a subject, the method comprising:
(1) determining a level of expression of one or more of the markers listed in Tables 2-6 present in a first biological sample obtained from the subject prior to administering at least a portion of the treatment regimen to the subject, using reagents that transform the markers such that the markers can be detected;
(2) determining a level of expression of one or more of the markers listed in Tables 2-6 present in a second biological sample obtained from the subject following administration of at least a portion of the treatment regimen to the subject, using reagents that transform the markers such that the markers can be detected;
(3) comparing the level of expression of one or more markers listed in Tables 2-6 present in the first sample obtained from the subject prior to administering at least a portion of the treatment regimen to the subject with the level of expression of the one or more markers present in the second sample obtained from the subject following administration of at least a portion of the treatment regimen; and
(4) assessing whether the treatment regimen is efficacious for treating the pervasive developmental disorder or symptoms of the pervasive developmental disorder, wherein a modulation in the level of expression of the one or more markers in the second sample as compared to the first sample is an indication that the treatment regimen is efficacious for treating the pervasive developmental disorder or symptoms of the pervasive developmental disorder in the subject.

9. The method of claim 8, further comprising continuing administration of the treatment regimen to the subject for whom the treatment regimen is determined to be efficacious for treating the pervasive developmental disorder or symptoms of the pervasive developmental disorder, or discontinuing administration of the treatment regimen to the subject for whom the treatment regimen is determined to be non-efficacious for treating the pervasive developmental disorder or symptoms of the pervasive developmental disorder.

10. A method of identifying a compound for treating a pervasive developmental disorder or symptoms of pervasive developmental disorders in a subject, the method comprising:
(1) contacting a biological sample with a test compound;
(2) determining the level of expression of one or more markers listed in Tables 2-6 present in the biological sample;
(3) comparing the level of expression of the one or more markers in the biological sample with that of a control sample not contacted by the test compound; and
(4) selecting a test compound that modulates the level of expression of the one or more markers in the biological sample,
thereby identifying a compound for treating a pervasive developmental disorder or symptoms of a pervasive developmental disorder in a subject.

11. The method of claim 1, wherein the pervasive developmental disorder is an autism spectrum disorder.

12. The method of claim 1, wherein the pervasive developmental disorder is autistic disorder.

13. The method of claim 1, wherein the pervasive developmental disorder is Alzheimer's disease.

14. The method of claim 1, wherein the pervasive developmental disorder is autism and Alzheimer's disease.

15. The method of claim 1, wherein the pervasive developmental disorder is Asperger's syndrome.

16. The method of claim 1, wherein the pervasive developmental disorder is a pervasive developmental disorder-not otherwise specified.

17. The method of claim 1, wherein the subject suffers from a pervasive developmental disorder.

18. The method of claim 1, wherein the subject exhibits subsyndromal manifestations of a pervasive developmental disorder.

19. The method of claim 1, wherein the subject is suspected to suffer from a pervasive developmental disorder.

20. The method of claim 1, wherein the level of expression of the one or more markers is determined at a nucleic acid level.

21. The method of claim 20, wherein the level of expression of the one or more markers is determined by detecting RNA.

22. The method of claim 20, wherein the level of expression of the one or more markers is determined by detecting mRNA, miRNA, or hnRNA.

23. The method of claim 20, wherein the level of expression of the one or more markers is determined by detecting DNA.

24. The method of claim 20, wherein the level of expression of the one or more markers is determined by detecting cDNA.

25. The method of claim 20, wherein the level of expression of the one or more markers is determined by using a technique selected from the group consisting of a polymerase chain reaction (PCR) amplification reaction, reverse-transcriptase PCR analysis, quantitative reverse-transcriptase PCR analysis, Northern blot analysis, an RNAase protection assay, digital RNA detection/quantitation, and a combination or sub-combination thereof.

26. The method of claim 20, wherein determining the level of expression of the one or more markers comprises performing an immunoassay using an antibody.

27. The method of claim 1, wherein the one or more markers comprises a protein.

28. The method of claim 27, wherein the protein is detected using a binding protein that binds at least one of the one or more markers.

29. The method of claim 27, wherein the binding protein comprises an antibody, or antigen binding fragment thereof, that specifically binds to the protein.

30. The method of claim 29, wherein the antibody or antigen binding fragment thereof is selected from the group consisting of a murine antibody, a human antibody, a humanized antibody, a bispecific antibody, a chimeric antibody, a Fab, Fab′, F(ab′)₂, scFv, SMIP, affibody, avimer, versabody, nanobody, a domain antibody, and an antigen binding fragment of any of the foregoing.

31. The method of claim 29, wherein the antibody or antigen binding fragment thereof comprises a label.

32. The method of claim 31, wherein the label is selected from the group consisting of a radio-label, a biotin-label, a chromophore, a fluorophore, and an enzyme.

33. The method of claim 1, wherein the level of expression of at least one of the one or more markers is determined by using a technique selected from the group consisting of an immunoassay, a western blot analysis, a radioimmunoassay, immunofluorimetry, immunoprecipitation, equilibrium dialysis, immunodiffusion, an electrochemiluminescence immunoassay (ECLIA), an ELISA assay, a polymerase chain reaction, an immunopolymerase chain reaction, and combinations or sub-combinations thereof.

34. The method of claim 33, wherein the immunoassay comprises a solution-based immunoassay selected from the group consisting of electrochemiluminescence, chemiluminescence, fluorogenic chemiluminescence, fluorescence polarization, and time-resolved fluorescence.

35. The method of claim 33, wherein the immunoassay comprises a sandwich immunoassay selected from the group consisting of electrochemiluminescence, chemiluminescence, and fluorogenic chemiluminescence.

36. The method of claim 1, wherein the sample comprises a fluid, or component thereof, obtained from the subject.

37. The method of claim 36, wherein the fluid is selected from the group consisting of blood, serum, synovial fluid, lymph, plasma, urine, amniotic fluid, aqueous humor, vitreous humor, bile, breast milk, cerebrospinal fluid, cerumen, chyle, cystic fluid, endolymph, feces, gastric acid, gastric juice, mucus, nipple aspirates, pericardial fluid, perilymph, peritoneal fluid, pleural fluid, pus, saliva, sebum, semen, sweat, serum, sputum, tears, vaginal secretions, and fluid collected from a biopsy.

38. The method of claim 1, wherein the sample comprises a tissue or cell, or component thereof, obtained from the subject.

39. A method for treating, alleviating symptoms of, inhibiting progression of, or preventing a pervasive developmental disorder in a subject, the method comprising administering to the subject in need thereof a therapeutically effective amount of a pharmaceutical composition comprising one or more of the markers listed in Tables 2-6.

40. A method for treating, alleviating symptoms of, inhibiting progression of, or preventing a pervasive developmental disorder in a subject, the method comprising administering to the subject in need thereof a therapeutically effective amount of a pharmaceutical composition comprising an agent that modulates expression or activity of one or more of the markers listed in Tables 2-6.

41. The method of claim 40, wherein the agent inhibits expression or activity of one or more of the markers listed in Tables 2-6.

42. The method of claim 40, wherein the agent augments expression or activity of one or more of the markers listed in Tables 2-6.

43. A method of identifying an agent that modulates the expression or activity of one or more of the markers listed in Tables 2-6, comprising
(1) contacting the one or more markers with a test agent,
(2) detecting the expression or activity of the one or more markers contacted with the test agent,
(3) comparing the expression or activity of the one or more markers contacted with the test agent with the expression or activity of the one or more markers in a control not contacted with the test agent, and
(4) identifying an agent that modulates the expression or activity of the one or more markers.

44. The method of claim 43, wherein the agent down-modulates at least one of the one or more markers listed in Tables 2-6.

45. The method of claim 44, wherein the agent up-modulates at least one of the one or more markers listed in Tables 2-6.

46. A method for treating, alleviating symptoms of, inhibiting progression of, or preventing a pervasive developmental disorder in a subject, the method comprising administering to the subject in need thereof a therapeutically effective amount of a pharmaceutical composition comprising an agent identified according to the method of claim 43.

47. The method of claim 1, wherein the subject is a human subject.
